(19) United States
(12) Patent Application Publication
(10) Pub. No.: US 2021/0238259 A1
(43) Pub. Date: Aug. 5, 2021

(54) FACTOR IX FUSION PROTEINS AND METHODS OF MAKING AND USING SAME

(71) Applicant: BIOVERATIV THERAPEUTICS INC., Waltham, MA (US)

(72) Inventors: Arjan VAN DER FLIER, Somerville, MA (US); Zhiqian LIU, Winchester, MA (US); David R. LIGHT, Somerville, MA (US); Ekta Seth CHHABRA, Framingham, MA (US); Tongyao LIU, Lexington, MA (US); Robert T. PETERS, Needham, MA (US); John KULMAN, Belmont, MA (US); Ayman ISMAIL, Cambridge, MA (US)

(21) Appl. No.: 16/478,747

(22) PCT Filed: Jan. 31, 2018
(86) PCT No.: PCT/US2018/016277

§ 371 Date: Jul. 17, 2019

Related U.S. Application Data
(60) Provisional application No. 62/452,826, filed on Jan. 31, 2017.

(51) Int. Cl. C07K 14/745; C12N 9/64

(52) U.S. Cl. CPC C07K 14/745; A61K 38/00; C12N 9/644

(57) ABSTRACT

The present disclosure provides Factor IX (FIX) fusion proteins comprising at least one heterologous moiety, such as an XTEN. The present disclosure further discloses methods of making and using the FIX fusion proteins.

### RELATED APPLICATIONS

[0001] This application is a 35 U.S.C. § 371 filing of International Patent Application No. PCT/US2018/016277, filed Jan. 31, 2018, which claims priority to U.S. Provisional Patent Application Ser. No. 62/452,826, filed Jan. 31, 2017, the entire disclosures of which are hereby incorporated herein by reference.

### REFERENCE TO SEQUENCE LISTING SUBMITTED ELECTRONICALLY

[0002] The content of the electronically submitted sequence listing in ASCII text file (Name: 614564_SA9-456US_Sequence_Listing.txt; Size: 712,358 bytes; and Date of Creation: Jul. 16, 2019) filed with the application is incorporated herein by reference in its entirety.

### BACKGROUND

[0003] Hemophilia B (also known as Christmas disease) is one of the most common inherited bleeding disorders in the world. It results in decreased in vivo and in vitro blood clotting activity and requires extensive medical monitoring throughout the life of the affected individual. In the absence of intervention, the afflicted individual will suffer from spontaneous bleeding in the joints, which produces severe pain and debilitating immobility; bleeding into muscles results in the accumulation of blood in those tissues; spontaneous bleeding in the throat and neck can cause asphyxiation if not immediately treated; renal bleeding; and severe bleeding following surgery, minor accidental injuries, or dental extractions also are prevalent.

[0004] Normal in vivo blood coagulation at minimum requires the serine proteases Factors II (prothrombin), VII, IX, X and XI (soluble plasma proteins); cofactors including the transmembrane protein tissue factor and the plasma proteins Factors V and VIII; fibrinogen, the transglutaminase Factor XIII, phospholipid (including activated platelets), and calcium. Additional proteins including kallikrein, high molecular weight kininogen, and Factor XII are required for some in vitro clotting tests, and can play a role in vivo under pathologic conditions.

[0005] In hemophilia, blood clotting is disturbed by a lack of certain plasma blood clotting factors. Hemophilia B is caused by a deficiency in Factor IX (FIX) that can result from either the decreased synthesis or absence of the FIX protein or a defective molecule with reduced activity. The treatment of hemophilia occurs by replacement of the missing clotting factor by exogenous factor concentrates highly enriched in FIX. However, generating such a concentrate from blood is fraught with technical difficulties, as is described below.

[0006] Purification of FIX from plasma (plasma derived FIX; pdFIX) almost exclusively yields fully-γ-carboxylated FIX. However, such purification of FIX from plasma is very difficult because FIX is only present in low concentration in plasma (5 μg/mL). Andersson, Thrombosis Research 7: 451 459 (1975). Further, purification from blood requires the removal or inactivation of infectious agents such as HIV and HCV. In addition, pdFIX has a short half-life and therefore requires frequent dosing. Recombinant Factor IX (rFIX) is also available, but suffers from the same short half-life and need for frequent dosing (e.g., 2-3 times per week for prophylaxis) as pdFIX.

[0007] Reduced mortality, prevention of joint damage and improved quality of life have been important achievements due to the development of plasma-derived and recombinant FIX. Prolonged protection from bleeding would represent another key advancement in the treatment of hemophilia B subjects. Therefore, there remains a need for improved recombinant FIX, which has a longer half-life, while maintaining an effective activity.

### BRIEF SUMMARY OF THE DISCLOSURE

[0008] Disclosed are methods of administering a Factor IX (FIX) fusion protein to a subject in need thereof, comprising subcutaneously administering to a subject a FIX fusion protein, wherein

[0009] (a) the FIX fusion protein comprises a FIX polypeptide and at least one XTEN, which is inserted within the FIX polypeptide at an insertion site corresponding to an amino acid selected from the group consisting of amino acid 103 of SEQ ID NO: 2, amino acid 105 of SEQ ID NO: 2, amino acid 142 of SEQ ID NO: 2, amino acid 149 of SEQ ID NO: 2, amino acid 162 of SEQ ID NO: 2, amino acid 166 of SEQ ID NO: 2, amino acid 174 of SEQ ID NO: 2, amino acid 224 of SEQ ID NO: 2, amino acid 226 of SEQ ID NO: 2, amino acid 228 of SEQ ID NO: 2, amino acid 413 of SEQ ID NO: 2, and any combination thereof, and

[0010] (b) wherein following the administration, the FIX fusion protein exhibits a plasma activity of from about 5% to about 30% in the subject.

[0011] Other aspects of the present disclosure are directed to methods of administering a Factor IX (FIX) fusion protein to a subject in need thereof, comprising subcutaneously administering to a subject a FIX fusion protein comprising a FIX polypeptide and an Fc domain, wherein the FIX fusion protein comprises an amino acid sequence having at least about 80%, 85%, 90%, 95%, 96%, 97%, 98%, 99%, or 100% sequence identity to SEQ ID NO: 229, wherein following the administration, the FIX fusion protein exhibits a plasma activity of from about 1% to about 30% in the subject.

[0012] In some embodiments, the FIX fusion protein is administered at a dose of about 50 IU/kg to about 400 IU/kg, e.g., at a dose of about 50 IU/kg, about 100 IU/kg, about 200 IU/kg, or about 400 IU/kg.

[0013] In some embodiments, the FIX fusion protein exhibits a plasma activity peak value of about 10% to about 30%. In some embodiments, the FIX fusion protein exhibits a plasma activity trough value of about 1% to about 10%.

[0014] In other embodiments, the Factor IX fusion proteins include at least one XTEN. In one aspect, the Factor IX (FIX) fusion protein comprises a FIX polypeptide and at least one XTEN which is inserted within the FIX polypeptide at an insertion site corresponding to an amino acid selected from the group consisting of amino acid 103 of SEQ ID NO: 2, amino acid 105 of SEQ ID NO: 2, amino acid 142 of SEQ ID NO: 2, amino acid 149 of SEQ ID NO: 2, amino acid 162 of SEQ ID NO: 2, amino acid 166 of SEQ ID NO: 2, amino acid 174 of SEQ ID NO: 2, amino acid 224 of SEQ ID NO: 2, amino acid 226 of SEQ ID NO: 2, amino acid 228 of SEQ ID NO: 2, amino acid 413 of SEQ ID NO: 2, and any combination thereof, and wherein the FIX fusion protein exhibits procoagulant activity. In certain embodiments, the insertion site corresponds to an amino acid selected from the group consisting of amino acid 149 of SEQ ID NO: 2, amino acid 162 of SEQ ID NO: 2, amino acid 166 of SEQ ID NO: 2, amino acid 174 of SEQ ID NO: 2 and any combination thereof.

[0015] In some embodiments, the XTEN comprises at least about 6 amino acids, at least about 12 amino acids, at least about 36 amino acids, at least about 42 amino acids, at least about 72 amino acids, at least about 144 amino acids, or at least about 288 amino acids. In certain embodiments, the XTEN comprises an amino acid sequence at least about 80%, at least about 85%, at least about 90%, at least about 95%, at least about 96%, at least about 97%, at least about 98%, at least about 99%, or about 100% identical to an amino acid sequence selected from the group consisting of SEQ ID NOs: 34, 35, 36, 37, 38, 39, 40, 41, 42, 43, 44, 45, 46, 47, 48, 49, 50, 51, 52, 53, 202, 203, 204, 205, 206, 207, 208, 209, 210, 211, 212, 213, 214, 230, and any combination thereof. In some embodiments, the XTEN comprises AE72. In one particular embodiment, the XTEN comprises SEQ ID NO: 230.

[0016] In some embodiments, the FIX fusion protein further comprises a second XTEN, wherein the XTEN is inserted within the FIX polypeptide at an insertion site corresponding to amino acid 166 of SEQ ID NO: 2, and wherein the second XTEN is fused to the C-terminus of the FIX polypeptide.

[0017] In some embodiments, the FIX fusion protein further comprises an Fc domain. In certain embodiments, the Fc domain is fused to the C-terminus of the FIX polypeptide. In certain embodiments, the FIX fusion protein further comprises a second Fc domain. In some embodiments, the FIX fusion protein further comprises two polypeptide chains, wherein the first polypeptide chain comprises the FIX polypeptide fused to the Fc domain, and the second polypeptide chain comprises the second Fc domain, wherein the first Fc domain and the second Fc domain are associated by a covalent bond.

[0018] In some embodiments, the FIX polypeptide is a R338L FIX (“Padua”) variant.

[0019] In some embodiments, the FIX fusion protein comprises a first chain and a second chain, wherein: (a) the first chain comprises: (i) a FIX polypeptide having a 338L mutation; (ii) optionally an XTEN, wherein the XTEN is inserted within the FIX polypeptide at an insertion site corresponding to amino acid 166 of SEQ ID NO: 2, and wherein the XTEN comprises an amino acid sequence having at least about 72 amino acids; and (iii) a first Fc domain, wherein the first Fc domain is fused to the FIX polypeptide; and (b) the second chain comprises a second Fc domain; wherein the first Fc domain and the second Fc domain are associated by a covalent bond.

[0020] The method for the disclosure also provides for an FIX fusion protein comprising a FIX polypeptide and a heterologous moiety comprising an XTEN, wherein the XTEN is fused to the C-terminus of the FIX polypeptide and comprises an amino acid sequence of longer than 42 amino acids and shorter than 144 amino acids in length.

[0021] The FIX fusion proteins of the present methods have several uses including providing a method of preventing, treating, ameliorating, or managing a clotting disease or condition in a patient in need thereof.

[0022] The disclosure also provides for a method of extending a half-life of a FIX polypeptide comprising inserting an XTEN within the FIX polypeptide at an insertion site corresponding to an amino acid selected from the group consisting of amino acid 103 of SEQ ID NO: 2, amino acid 105 of SEQ ID NO: 2, amino acid 142 of SEQ ID NO: 2, amino acid 149 of SEQ ID NO: 2, amino acid 162 of SEQ ID NO: 2, amino acid 166 of SEQ ID NO: 2, amino acid 174 of SEQ ID NO: 2, amino acid 224 of SEQ ID NO: 2, amino acid 226 of SEQ ID NO: 2, amino acid 228 of SEQ ID NO: 2, amino acid 413 of SEQ ID NO: 2, and any combination thereof, thereby constructing a FIX fusion protein, wherein the FIX protein exhibits procoagulant activity.

[0023] Additional disclosure embodiments will be apparent from the description and figures that follow.

### INCORPORATION BY REFERENCE

[0024] All publications, patents, and patent applications disclosed herein are incorporated by reference to the same extent as if each individual publication, patent or patent application was specifically and individually indicated to be incorporated by reference.

### BRIEF DESCRIPTION OF THE DRAWINGS

[0025] FIG. 1 is a graph depicting the activity of FIX fusion proteins comprising an XTEN of 42 amino acids (e.g., AE42) inserted at various insertions sites (e.g., at amino acid 52, amino acid 59, amino acid 66, amino acid 80, amino acid 85, amino acid 89, amino acid 103, amino acid 105, amino acid 113, amino acid 129, amino acid 142, amino acid 149, amino acid 162, amino acid 166, amino acid 174, amino acid 188, amino acid 202, amino acid 224, amino acid 226, amino acid 228, amino acid 230, amino acid 240, amino acid 257, amino acid 265, amino acid 277, amino acid 283, amino acid 292, amino acid 316, amino acid 341, amino acid 354, amino acid 392, amino acid 403, and amino acid 413, corresponding to amino acids of SEQ ID NO: 2) or fused to the C-terminus (C-term) of the FIX polypeptide. C-terminus fused XTEN sequences contain an thrombin-cleavable site between FIX and the C-terminal fusion. The Y-axis shows the FIX activity as a percent of the activity of the base construct (FIX-R338L) in conditioned media by chromogenic assay. The X-axis shows the specific insertion sites as the amino acid number (corresponding to SEQ ID NO: 2) and the single-letter amino acid abbreviation. The corresponding domains (e.g., GLA, EGF1, EGF2, linker, AP, and the catalytic domain), linker regions, and C-terminus (“C-term”) of FIX are indicated below the X-axis.

[0026] FIG. 2 is a graph depicting the activity of FIX fusion proteins comprising an XTEN of 42 amino acids (AE42), 72 amino acids (AE72), 144 amino acids (AE144), 288 amino acids (AE288), and 864 amino acids (AE864) inserted at various insertions sites (e.g., at amino acid 103, amino acid 105, amino acid 142, amino acid 149, amino acid 162, amino acid 166, amino acid 174, amino acid 224, and amino acid 413, corresponding to amino acids of SEQ ID NO:2) or fused to the C-terminus (C-term, amino acid 415) of the FIX polypeptide. The Y-axis shows the FIX activity as a percent of the activity of the base construct (FIX-R338L) in conditioned media by chromogenic assay. The X-axis shows the domain (e.g., EGF2, AP, and catalytic domains) or region (e.g., linker and C-terminus) of each insertion site and the specific insertion sites as the amino acid number (corresponding to SEQ ID NO: 2). Arrows indicate the insertion sites selected for further experimentation (see FIGS. 3A-3B).

[0027] FIG. 3A is a schematic representation of the regions and domains of the R338L FIX variant. Specific amino acid residues (e.g., N105, D166, and E224) and the C-terminus are highlighted as potential heterologous moiety, e.g., XTEN, insertion sites. FIG. 3B shows illustrations of the three-dimensional structure of the porcine FIX (PDB:1PFX) from three different angles. The insertion sites N105, D166, and E224, the C-terminus, and the location of the R338L mutation (e.g., in the R338L FIX variant) are labeled.

[0028] FIG. 4 summarizes the relative activities of FIX fusion proteins comprising one or two XTENs (e.g., XTEN of 42, 72, 144, and 288 amino acids), or comprising one XTEN and one Fc domain, or FIXFc. The Y-axis shows the FIX activity as a percent of the activity of the base construct (FIX-R338L) in conditioned media by chromogenic assay. The X-axis shows the construct number, and the table below the X-axis shows the composition of XTEN and Fc for each construct tested. EGF2 (105), AP (166), 60 loop (224), and C-term XTEN or Fc indicate the position where the XTEN or Fc is inserted or fused. The numbers (e.g., 42, 72, 144, and 288, indicating the size of the XTEN) and “Fc” in each box in the table below the X-axis indicate which moiety is inserted within or fused to the C-terminus of the FIX polypeptide.

[0029] FIG. 5A provides a graph depicting the plasma percentile of dosed FIX clotting activities against time of various FIX fusion proteins with thrombin-cleavable C-terminal XTEN fusions of various length (e.g., FIX-CT.288 (XTEN of 288 amino acids, e.g., AE288) and FIX-CT.864 (XTEN of 864 amino acids, e.g., AE864)), compared to rFIX and rFIXFc as measured after single bolus intravenous dosing in hemophilia-B mice. FIG. 5B provides a graph depicting the plasma percentile of dosed FIX clotting activities against time of various FIX fusion proteins with XTEN fusions of various length inserted into the activation peptide (AP) domain (e.g., FIX-AP.144, FIX-AP.72, and FIX-AP.42) compared to rFIX and rFIXFc, as measured after single bolus intravenous dosing in hemophilia-B mice. FIG. 5C provides a graphical compilation of the calculated pharmacokinetic parameters of a single intravenous bolus dosed FIX fusion protein shown in FIGS. 5A and 5B. Indicated on the Y-axis is percentile of plasma activity recovery for each of the indicated molecules. The X-axis shows the calculated mean residence time (MRT, in hours), and the area of the dots represent the relative calculated area under the curve per dose (AUC/D, in h/kg/mL).

[0030] FIG. 6A provides a graph depicting the plasma percentile of dosed FIX clotting activities against time of various FIX fusion proteins with XTEN fusions of various length inserted into the activation peptide (AP) domain (e.g., FIXFc-AP.72 and FIXFc-AP.42) or EGF2 domain (e.g., FIXFc-EGF.42) compared to rFIX and rFIXFc, as measured after single bolus intravenous dosing in hemophilia-B mice. FIG. 6B provides a graphical compilation of the calculated pharmacokinetic parameters of a single intravenous bolus dosed FIX fusion proteins shown in FIG. 6A. Indicated on the Y-axis is percentile of plasma activity recovery for each of the indicated molecules. The X-axis shows the calculated mean residence time (MRT, in hours). The area of the dots represents the relative calculated area under the curve per dose (AUC/D, in h/kg/mL).

[0031] FIG. 7A provides a graph depicting the plasma percentile of dosed FIX clotting activities against time of a FIX fusion protein comprising an thrombin-cleavable XTEN of 288 amino acids fused to the C terminus of a FIX polypeptide (rFIX-CT.288), a FIX fusion protein comprising an XTEN of 72 amino acids inserted within the AP domain of a FIX polypeptide (rFIXFc-AP.72), and a FIX fusion protein comprising an XTEN of 42 amino acids inserted within the EGF2 domain of a FIX polypeptide (rFIXFc-EGF2.42) compared to rFIX and rFIXFc, as measured after single bolus subcutaneous dosing in hemophilia-B mice. FIG. 7B provides a graphical compilation of the calculated pharmacokinetic parameters of a single subcutaneous bolus dosed FIX fusion proteins shown in FIG. 7A. Indicated on the Y-axis is percentile of bioavailability for each of the indicated molecules. The X-axis shows the calculated mean residence time (MRT, in hours). The area of the dots represents the relative calculated area under the curve per dose (AUC/D, in h/kg/mL).

[0032] FIG. 8A provides a graphical depiction of clotting time in seconds measured by rotational thromboelastometry (ROTEM) of rFIXFc and a FIX fusion protein comprising an XTEN of 72 amino acids inserted within the AP domain of FIX (e.g., rFIXFc-AP-XTEN.72) in human hemophilia B blood. FIG. 8B provides a graphical depiction of alpha angle in degrees of rFIXFc and a FIX fusion protein (e.g., rFIXFc-AP-XTEN.72) in human hemophilia B blood. FIG. 8C provides a graphical depiction of maximum clot firmness (MCF) in mm of rFIXFc and a FIX fusion protein (e.g., rFIXFc-AP-XTEN.72) in human hemophilia B blood.

[0033] FIG. 9 is a graph showing the acute efficacy of rFIXFc-AP.72 compared to rFIXFc in the tail clip bleeding model. Results presented are individual and median blood loss (μl) at 5 minutes post dosing, over a 30 minutes period for treatments and dosing as indicated. Asterisks indicate significant p values for vehicle versus all other treatments. Data indicate similar or improved efficacy in mice dosed with rFIXFc-AP.72 compared to rFIXFc.

[0034] FIG. 10 is a graph showing the percentage of HemB mice surviving (Y-axis) plotted against the time in hours post tail vein transection (X-axis). All mice were pre-dosed 72 hours prior to the tail vein transection intravenously with FIXFc (dotted lines) or subcutaneously with FIXFc-AP.72 at the indicated IU/kg (FIXFc-AP.72: 100 IU/kg (solid black circle), 50 IU/kg (solid grey triangle), and 15 IU/kg (solid inverted grey triangle); rFIXFc: 100 IU/kg (open circle), 50 IU/kg (open triangle), and 15 IU/kg (open inverted triangle); and vehicle (closed grey circle). Survival plots for mice dosed with either rFIXFc or FIXFc-AP.72 are all significantly different when compared to vehicle treated mice (p<0.0001, Log-rank (Mantel-Cox) test.

[0035] FIG. 11A is a graph showing the plasma levels of FX activity as measured by a one-stage plasma assay plotted versus time for Hemophilia B mice which were dosed by either intravenous (dashed lines) or subcutaneous injection (solid lines) with a single bolus (200 IU/kg) of rFIX (grey) or the rFIXFc-AP.72 fusion protein (black). FIG. 11B shows pharmacokinetic parameters as determined using non-compartmental analysis (NCA) using Phoenix WinNonLin 6.2.1 software (Pharsight, Certara).

[0036] FIG. 12A is a schematic drawing illustrating the domain structure of rFIXFc-AP.72 single chain Fc. FIG. 12B is a schematic drawing showing the domain structure of rFIXFc-AP.72 dual chain Fc. “FIX HC” refers to the heavy chain of FIX; “FIX LC” refers to the light chain of FIX, which includes the EGF and GLA domains of FIX; and AP refers to the activation peptide of FIX.

[0037] FIG. 13 is a table summarizing the FIX-XTEN constructs as used in the examples with matching sequence identification number, description and plasmid code.

[0038] FIGS. 14A and 14B show graphical representations of FIX plasma activity following administration of single chain rFIXFc-AP.72 in HemB mice. Subcutaneous pharmacokinetic curves following administration of 50 IU/kg (light grey circles), 100 IU/kg (medium grey circles), 200 IU/kg (dark grey circles), and 400 IU/kg (black circles) rFIXFc-AP.72 are shown as FIX plasma activity in IU/dL (FIG. 14A) and as a percentile recovered from injected dose (FIG. 14B). FIG. 14C shows a matching table, listing the calculated pharmacological parameters shown in FIG. 14A, using Phoenix WinNonLin software.

[0039] FIG. 15A is a graphical representation of the plasma activity (solid lines) and antigen (dotted lines) of single chain rFIXFc-AP.72 (pJH84; SEQ ID NO: 151) administered at 100 IU/kg by intravenous (grey lines) or subcutaneously (black lines) injection (mean±SD, n=3) in cynomolgus monkeys. FIG. 15B is a matching table, listing the calculated pharmacological parameters of FIG. 15A, using Phoenix WinNonLin software.

[0040] FIG. 16 Is a graphical representation of the plasma activity levels (IU/dL) in HemB mice following subcutaneous (SQ) administration of 100 IU/kg (dark grey fill) or 200 IU/kg (light grey fill) rFIXFc-AP.72 (pJH84; SEQ ID NO: 151) and HemB mice following intravenous (IV) administration of 50 IU/kg (solid line), 100 IU/kg (large dashed line), or 200 IU/kg (small dashed line) rFIXFc. Data is presented from 1 day post administration up to the 7 day trough. Horizontal, overlaid lines indicate the 30% peak value and the 5% trough level, as shown.

### DETAILED DESCRIPTION

[0041] This disclosure provides a FIX fusion protein comprising a FIX polypeptide and at least one heterologous moiety and methods of making and using the same. In certain aspects, the FIX fusion protein comprises at least one heterologous moiety inserted within the FIX polypeptide, fused to the C-terminus of the FIX polypeptide, or both, wherein the FIX fusion protein exhibits procoagulant activity. In a particular aspect, the heterologous moiety is XTEN.

### I. Definitions

[0042] Throughout this disclosure, the term “a” or “an” entity refers to one or more of that entity; for example, “a polynucleotide,” is understood to represent one or more polynucleotides. As such, the terms “a” (or “an”), “one or more,” and “at least one” can be used interchangeably herein.

[0043] Furthermore, “and/or” where used herein is to be taken as specific disclosure of each of the two specified features or components with or without the other. Thus, the term “and/or” as used in a phrase such as “A and/or B” herein is intended to include “A and B,” “A or B,” “A” (alone), and “B” (alone). Likewise, the term “and/or” as used in a phrase such as “A, B, and/or C” is intended to encompass each of the following aspects: A, B, and C; A, B, or C; A or C; A or B; B or C; A and C; A and B; B and C; A (alone); B (alone); and C (alone).

[0044] It is understood that wherever aspects are described herein with the language “comprising,” otherwise analogous aspects described in terms of “consisting of” and/or “consisting essentially of” are also provided.

[0045] Unless defined otherwise, all technical and scientific terms used herein have the same meaning as commonly understood by one of ordinary skill in the art to which this disclosure is related. For example, the Concise Dictionary of Biomedicine and Molecular Biology, Juo, Pei-Show, 2nd ed., 2002, CRC Press; The Dictionary of Cell and Molecular Biology, 3rd ed., 1999, Academic Press; and the Oxford Dictionary Of Biochemistry And Molecular Biology, Revised, 2000, Oxford University Press, provide one of skill with a general dictionary of many of the terms used in this disclosure.

[0046] Units, prefixes, and symbols are denoted in their Systeme International de Unites (SI) accepted form. Numeric ranges are inclusive of the numbers defining the range. Unless otherwise indicated, amino acid sequences are written left to right in amino to carboxy orientation. The headings provided herein are not limitations of the various aspects of the disclosure, which can be had by reference to the specification as a whole. Accordingly, the terms defined immediately below are more fully defined by reference to the specification in its entirety.

[0047] The term “about” is used herein to mean approximately, roughly, around, or in the regions of When the term “about” is used in conjunction with a numerical range, it modifies that range by extending the boundaries above and below the numerical values set forth. In general, the term “about” can modify a numerical value above and below the stated value by a variance of, e.g., 10 percent, up or down (higher or lower).

[0048] The term “polynucleotide” or “nucleotide” is intended to encompass a singular nucleic acid as well as plural nucleic acids, and refers to an isolated nucleic acid molecule or construct, e.g., messenger RNA (mRNA) or plasmid DNA (pDNA). In certain embodiments, a polynucleotide comprises a conventional phosphodiester bond or a non-conventional bond (e.g., an amide bond, such as found in peptide nucleic acids (PNA)). The term “nucleic acid” refers to any one or more nucleic acid segments, e.g., DNA or RNA fragments, present in a polynucleotide. By “isolated” nucleic acid or polynucleotide is intended a nucleic acid molecule, DNA or RNA, which has been removed from its native environment. For example, a recombinant polynucleotide encoding a FIX polypeptide contained in a vector is considered isolated for the purposes of the present disclosure. Further examples of an isolated polynucleotide include recombinant polynucleotides maintained in heterologous host cells or purified (partially or substantially) from other polynucleotides in a solution. Isolated RNA molecules include in vivo or in vitro RNA transcripts of polynucleotides of the present disclosure. Isolated polynucleotides or nucleic acids according to the present disclosure further include such molecules produced synthetically. In addition, a polynucleotide or a nucleic acid can include regulatory elements such as promoters, enhancers, ribosome binding sites, or transcription termination signals.

[0049] As used herein, a “coding region” or “coding sequence” is a portion of polynucleotide, which consists of codons translatable into amino acids. Although a “stop codon” (TAG, TGA, or TAA) is typically not translated into an amino acid, it may be considered to be part of a coding region, but any flanking sequences, for example promoters, ribosome binding sites, transcriptional terminators, introns, and the like, are not part of a coding region. The boundaries of a coding region are typically determined by a start codon at the 5′ terminus, encoding the amino terminus of the resultant polypeptide, and a translation stop codon at the 3′ terminus, encoding the carboxyl terminus of the resulting polypeptide. Two or more coding regions of the present disclosure can be present in a single polynucleotide construct, e.g., on a single vector, or in separate polynucleotide constructs, e.g., on separate (different) vectors. It follows, then, that a single vector can contain just a single coding region, or comprise two or more coding regions, e.g., a single vector can separately encode a binding domain-A and a binding domain-B as described below. In addition, a vector, polynucleotide, or nucleic acid of the disclosure can encode heterologous coding regions, either fused or unfused to a nucleic acid encoding a binding domain of the disclosure. Heterologous coding regions include without limitation specialized elements or motifs, such as a secretory signal peptide or a heterologous functional domain.

[0050] Certain proteins secreted by mammalian cells are associated with a secretory signal peptide, which is cleaved from the mature protein once export of the growing protein chain across the rough endoplasmic reticulum has been initiated. Those of ordinary skill in the art are aware that signal peptides are generally fused to the N-terminus of the polypeptide, and are cleaved from the complete or “full-length” polypeptide to produce a secreted or “mature” form of the polypeptide. In certain embodiments, a native signal peptide or a functional derivative of that sequence that retains the ability to direct the secretion of the polypeptide that is operably associated with it. Alternatively, a heterologous mammalian signal peptide, e.g., a human tissue plasminogen activator (TPA) or mouse ß-glucuronidase signal peptide, or a functional derivative thereof, can be used.

[0051] The term “downstream” refers to a nucleotide sequence that is located 3′ to a reference nucleotide sequence. In certain embodiments, downstream nucleotide sequences relate to sequences that follow the starting point of transcription. For example, the translation initiation codon of a gene is located downstream of the start site of transcription. “Downstream” can also refer to a peptide sequence that is located C-terminal to a reference peptide sequence.

[0052] The term “upstream” refers to a nucleotide sequence that is located 5′ to a reference nucleotide sequence. In certain embodiments, upstream nucleotide sequences relate to sequences that are located on the 5′ side of a coding region or starting point of transcription. For example, most promoters are located upstream of the start site of transcription. “Upstream” can also refer to a peptide sequence that is located N-terminal to a reference peptide sequence.

[0053] As used herein, the term “regulatory region” refers to nucleotide sequences located upstream (5′ non-coding sequences), within, or downstream (3′ non-coding sequences) of a coding region, and which influence the transcription, RNA processing, stability, or translation of the associated coding region. Regulatory regions may include promoters, translation leader sequences, introns, polyadenylation recognition sequences, RNA processing sites, effector binding sites and stem-loop structures. If a coding region is intended for expression in a eukaryotic cell, a polyadenylation signal and transcription termination sequence will usually be located 3′ to the coding sequence.

[0054] A polynucleotide, which encodes a gene product, e.g., a polypeptide, can include a promoter and/or other transcription or translation control elements operably associated with one or more coding regions. In an operable association a coding region for a gene product, e.g., a polypeptide, is associated with one or more regulatory regions in such a way as to place expression of the gene product under the influence or control of the regulatory region(s). For example, a coding region and a promoter are “operably associated” if induction of promoter function results in the transcription of mRNA encoding the gene product encoded by the coding region, and if the nature of the linkage between the promoter and the coding region does not interfere with the ability of the promoter to direct the expression of the gene product or interfere with the ability of the DNA template to be transcribed. Other transcription control elements, besides a promoter, for example enhancers, operators, repressors, and transcription termination signals, can also be operably associated with a coding region to direct gene product expression.

[0055] A variety of transcription control regions are known to those skilled in the art. These include, without limitation, transcription control regions, which function in vertebrate cells, such as, but not limited to, promoter and enhancer segments from cytomegaloviruses (the immediate early promoter, in conjunction with intron-A), simian virus 40 (the early promoter), and retroviruses (such as Rous sarcoma virus). Other transcription control regions include those derived from vertebrate genes such as actin, heat shock protein, bovine growth hormone and rabbit ß-globin, as well as other sequences capable of controlling gene expression in eukaryotic cells. Additional suitable transcription control regions include tissue-specific promoters and enhancers as well as lymphokine-inducible promoters (e.g., promoters inducible by interferons or interleukins).

[0056] Similarly, a variety of translation control elements are known to those of ordinary skill in the art. These include, but are not limited to ribosome binding sites, translation initiation and termination codons, and elements derived from picornaviruses (particularly an internal ribosome entry site, or IRES, also referred to as a CITE sequence).

[0057] The term “expression” as used herein refers to a process by which a polynucleotide produces a gene product, for example, an RNA or a polypeptide. It includes without limitation transcription of the polynucleotide into messenger RNA (mRNA), transfer RNA (tRNA), small hairpin RNA (shRNA), small interfering RNA (siRNA) or any other RNA product, and the translation of an mRNA into a polypeptide. Expression produces a “gene product.” As used herein, a gene product can be either a nucleic acid, e.g., a messenger RNA produced by transcription of a gene, or a polypeptide which is translated from a transcript. Gene products described herein further include nucleic acids with post transcriptional modifications, e.g., polyadenylation or splicing, or polypeptides with post translational modifications, e.g., methylation, glycosylation, the addition of lipids, association with other protein subunits, or proteolytic cleavage.

[0058] A “vector” refers to any vehicle for the cloning of and/or transfer of a nucleic acid into a host cell. A vector may be a replicon to which another nucleic acid segment may be attached so as to bring about the replication of the attached segment. A “replicon” refers to any genetic element (e.g., plasmid, phage, cosmid, chromosome, virus) that functions as an autonomous unit of replication in vivo, i.e., capable of replication under its own control. The term “vector” includes both viral and nonviral vehicles for introducing the nucleic acid into a cell in vitro, ex vivo or in vivo. A large number of vectors are known and used in the art including, for example, plasmids, modified eukaryotic viruses, or modified bacterial viruses. Insertion of a polynucleotide into a suitable vector can be accomplished by ligating the appropriate polynucleotide fragments into a chosen vector that has complementary cohesive termini.

[0059] Vectors may be engineered to encode selectable markers or reporters that provide for the selection or identification of cells that have incorporated the vector. Expression of selectable markers or reporters allows identification and/or selection of host cells that incorporate and express other coding regions contained on the vector. Examples of selectable marker genes known and used in the art include: genes providing resistance to ampicillin, streptomycin, gentamycin, kanamycin, hygromycin, neomycin, puromycin, bialaphos herbicide, sulfonamide, and the like; and genes that are used as phenotypic markers, i.e., anthocyanin regulatory genes, isopentanyl transferase gene, and the like. Examples of reporters known and used in the art include: luciferase (Luc), green fluorescent protein (GFP), chloramphenicol acetyltransferase (CAT), -galactosidase (LacZ), -glucuronidase (Gus), and the like. Selectable markers may also be considered to be reporters.

[0060] The term “plasmid” refers to an extra-chromosomal element often carrying a gene that is not part of the central metabolism of the cell, and usually in the form of circular double-stranded DNA molecules. Such elements may be autonomously replicating sequences, genome integrating sequences, phage or nucleotide sequences, linear, circular, or supercoiled, of a single- or double-stranded DNA or RNA, derived from any source, in which a number of nucleotide sequences have been joined or recombined into a unique construction which is capable of introducing a promoter fragment and DNA sequence for a selected gene product along with appropriate 3′ untranslated sequence into a cell.

[0061] Eukaryotic viral vectors that can be used include, but are not limited to, adenovirus vectors, retrovirus vectors, adeno-associated virus vectors, and poxvirus, e.g., vaccinia virus vectors, baculovirus vectors, or herpesvirus vectors. Non-viral vectors include plasmids, liposomes, electrically charged lipids (cytofectins), DNA-protein complexes, and biopolymers.

[0062] A “cloning vector” refers to a “replicon,” which is a unit length of a nucleic acid that replicates sequentially and which comprises an origin of replication, such as a plasmid, phage or cosmid, to which another nucleic acid segment may be attached so as to bring about the replication of the attached segment. Certain cloning vectors are capable of replication in one cell type, e.g., bacteria and expression in another, e.g., eukaryotic cells. Cloning vectors typically comprise one or more sequences that can be used for selection of cells comprising the vector and/or one or more multiple cloning sites for insertion of nucleic acid sequences of interest.

[0063] The term “expression vector” refers to a vehicle designed to enable the expression of an inserted nucleic acid sequence following insertion into a host cell. The inserted nucleic acid sequence is placed in operable association with regulatory regions as described above.

[0064] Vectors are introduced into host cells by methods well known in the art, e.g., transfection, electroporation, microinjection, transduction, cell fusion, DEAE dextran, calcium phosphate precipitation, lipofection (lysosome fusion), use of a gene gun, or a DNA vector transporter.

[0065] “Culture,” “to culture” and “culturing,” as used herein, means to incubate cells under in vitro conditions that allow for cell growth or division or to maintain cells in a living state. “Cultured cells,” as used herein, means cells that are propagated in vitro.

[0066] As used herein, the term “polypeptide” is intended to encompass a singular “polypeptide” as well as plural “polypeptides,” and refers to a molecule composed of monomers (amino acids) linearly linked by amide bonds (also known as peptide bonds). The term “polypeptide” refers to any chain or chains of two or more amino acids, and does not refer to a specific length of the product. Thus, peptides, dipeptides, tripeptides, oligopeptides, “protein,” “amino acid chain,” or any other term used to refer to a chain or chains of two or more amino acids, are included within the definition of “polypeptide,” and the term “polypeptide” can be used instead of, or interchangeably with any of these terms. The term “polypeptide” is also intended to refer to the products of post-expression modifications of the polypeptide, including without limitation glycosylation, acetylation, phosphorylation, amidation, derivatization by known protecting/blocking groups, proteolytic cleavage, or modification by non-naturally occurring amino acids. A polypeptide can be derived from a natural biological source or produced recombinant technology, but is not necessarily translated from a designated nucleic acid sequence. It can be generated in any manner, including by chemical synthesis.

[0067] An “isolated” polypeptide or a fragment, variant, or derivative thereof refers to a polypeptide that is not in its natural milieu. No particular level of purification is required. For example, an isolated polypeptide can simply be removed from its native or natural environment. Recombinantly produced polypeptides and proteins expressed in host cells are considered isolated for the purpose of the disclosure, as are native or recombinant polypeptides which have been separated, fractionated, or partially or substantially purified by any suitable technique.

[0068] As used herein, the term “host cell” refers to a cell or a population of cells harboring or capable of harboring a recombinant nucleic acid. Host cells can be a prokaryotic cells (e.g., E. coli), or alternatively, the host cells can be eukaryotic, for example, fungal cells (e.g., yeast cells such as Saccharomyces cerevisiae, Pichia pastoris, or Schizosaccharomyces pombe), and various animal cells, such as insect cells (e.g., Sf-9) or mammalian cells (e.g., HEK293F, CHO, COS-7, NIH-3T3).

[0069] Also included in the present disclosure are fragments or variants of polypeptides, and any combination thereof. The term “fragment” or “variant” when referring to polypeptide binding domains or binding molecules of the present disclosure include any polypeptides which retain at least some of the properties (e.g., FcRn binding affinity for an FcRn binding domain or Fc variant, or coagulation activity for a FIX variant) of the reference polypeptide. Fragments of polypeptides include proteolytic fragments, as well as deletion fragments, in addition to specific antibody fragments discussed elsewhere herein, but do not include the naturally occurring full-length polypeptide (or mature polypeptide). Variants of polypeptide binding domains or binding molecules of the present disclosure include fragments as described above, and also polypeptides with altered amino acid sequences due to amino acid substitutions, deletions, or insertions. Variants can be naturally or non-naturally occurring. Non-naturally occurring variants can be produced using art-known mutagenesis techniques. Variant polypeptides can comprise conservative or non-conservative amino acid substitutions, deletions or additions. One particular FIX variant disclosed herein is the R338L FIX (Padua) variant (SEQ ID NO: 2). See, e.g., Simioni, P., et al., “X-Linked Thrombophilia with a Mutant Factor IX (Factor IX Padua),” NEJM 361:1671-75 (October 2009), which is incorporated by reference herein in its entirety.

[0070] A “conservative amino acid substitution” is one in which the amino acid residue is replaced with an amino acid residue having a similar side chain. Families of amino acid residues having similar side chains have been defined in the art, including basic side chains (e.g., lysine, arginine, histidine), acidic side chains (e.g., aspartic acid, glutamic acid), uncharged polar side chains (e.g., glycine, asparagine, glutamine, serine, threonine, tyrosine, cysteine), nonpolar side chains (e.g., alanine, valine, leucine, isoleucine, proline, phenylalanine, methionine, tryptophan), beta-branched side chains (e.g., threonine, valine, isoleucine) and aromatic side chains (e.g., tyrosine, phenylalanine, tryptophan, histidine). Thus, if an amino acid in a polypeptide is replaced with another amino acid from the same side chain family, the substitution is considered to be conservative. In another embodiment, a string of amino acids can be conservatively replaced with a structurally similar string that differs in order and/or composition of side chain family members.

[0071] The term “percent sequence identity” between two polynucleotide or polypeptide sequences refers to the number of identical matched positions shared by the sequences over a comparison window, taking into account additions or deletions (i.e., gaps) that must be introduced for optimal alignment of the two sequences. A matched position is any position where an identical nucleotide or amino acid is presented in both the target and reference sequence. Gaps presented in the target sequence are not counted since gaps are not nucleotides or amino acids. Likewise, gaps presented in the reference sequence are not counted since target sequence nucleotides or amino acids are counted, not nucleotides or amino acids from the reference sequence.

[0072] The percentage of sequence identity is calculated by determining the number of positions at which the identical amino-acid residue or nucleic acid base occurs in both sequences to yield the number of matched positions, dividing the number of matched positions by the total number of positions in the window of comparison and multiplying the result by 100 to yield the percentage of sequence identity. The comparison of sequences and determination of percent sequence identity between two sequences may be accomplished using readily available software both for online use and for download. Suitable software programs are available from various sources, and for alignment of both protein and nucleotide sequences. One suitable program to determine percent sequence identity is bl2seq, part of the BLAST suite of programs available from the U.S. government's National Center for Biotechnology Information BLAST web site (blast.ncbi.nlm.nih.gov). Bl2seq performs a comparison between two sequences using either the BLASTN or BLASTP algorithm. BLASTN is used to compare nucleic acid sequences, while BLASTP is used to compare amino acid sequences. Other suitable programs are, e.g., Needle, Stretcher, Water, or Matcher, part of the EMBOSS suite of bioinformatics programs and also available from the European Bioinformatics Institute (EBI) at www.ebi.ac.uk/Tools/psa.

[0073] Different regions within a single polynucleotide or polypeptide target sequence that aligns with a polynucleotide or polypeptide reference sequence can each have their own percent sequence identity. It is noted that the percent sequence identity value is rounded to the nearest tenth. For example, 80.11, 80.12, 80.13, and 80.14 are rounded down to 80.1, while 80.15, 80.16, 80.17, 80.18, and 80.19 are rounded up to 80.2. It also is noted that the length value will always be an integer.

[0074] One skilled in the art will appreciate that the generation of a sequence alignment for the calculation of a percent sequence identity is not limited to binary sequence-sequence comparisons exclusively driven by primary sequence data. Sequence alignments can be derived from multiple sequence alignments. One suitable program to generate multiple sequence alignments is ClustalW2, available from www.clustal.org. Another suitable program is MUSCLE, available from www.drive5.com/muscle/. ClustalW2 and MUSCLE are alternatively available, e.g., from the EBI.

[0075] It will also be appreciated that sequence alignments can be generated by integrating sequence data with data from heterogeneous sources such as structural data (e.g., crystallographic protein structures), functional data (e.g., location of mutations), or phylogenetic data. A suitable program that integrates heterogeneous data to generate a multiple sequence alignment is T-Coffee, available at www.tcoffee.org, and alternatively available, e.g., from the EBI. It will also be appreciated that the final alignment used to calculate percent sequence identity may be curated either automatically or manually.

[0076] As used herein, an “amino acid corresponding to,” “site corresponding to,” or “equivalent amino acid” in a Factor IX protein sequence is identified by alignment to maximize the identity or similarity between a first FIX sequence and a second FIX sequence. The number used to identify an equivalent amino acid in a second FIX sequence is based on the number used to identify the corresponding amino acid in the first FIX sequence.

[0077] As used herein, the term “insertion site” refers to an amino acid residue number in aFIX polypeptide (typically a mature FIX polypeptide), or fragment, variant, or derivative thereof, which is immediately upstream of the position at which a heterologous moiety can be inserted. An “insertion site” is specified as a number, the number being the number of the amino acid in the R338L FIX (Padua) variant (SEQ ID NO: 2) to which the insertion site corresponds, which is immediately N-terminal to the position of the insertion. For example, the phrase “the EGF2 domain comprises an XTEN at an insertion site which corresponds to amino acid 105 of SEQ ID NO: 2” indicates that the heterologous moiety is located between two amino acids corresponding to amino acid 105 and amino acid 106 of SEQ ID NO: 2. However, one of skill in the art would readily be able to identify a corresponding position in any FIX variant, and the present disclosure is not limited to insertions made solely in the R338L FIX (Padua) variant. Rather, the insertions disclosed herein can be made in any FIX variant or fragment thereof having procoagulant activity at a position corresponding to a position of the R338L FIX variant.

[0078] The phrase “immediately downstream of an amino acid” as used herein refers to position right next to the terminal carboxyl group of the amino acid. Similarly, the phrase “immediately upstream of an amino acid” refers to the position right next to the terminal amine group of the amino acid. Therefore, the phrase “between two amino acids of an insertion site” as used herein refers to a position in which an XTEN or any other polypeptide is inserted between two adjacent amino acids.

[0079] The terms “inserted,” “is inserted,” “inserted into” or grammatically related terms, as used herein refers to the position of an XTEN in a fusion polypeptide relative to the analogous position in the R338L FIX (Padua) variant (SEQ ID NO: 2). Those of skill in the field will understand how to identify corresponding insertion positions with respect to other FIX polypeptide sequences such as that shown as SEQ ID NO:1. As used herein the terms refer to the characteristics of the recombinant FIX polypeptide relative to the R338L FIX (Padua) variant, and do not indicate, imply or infer any methods or process by which the fusion polypeptide was made. For example, in reference to a fusion polypeptide provided herein, the phrase “an XTEN is inserted into the EGF2 domain immediately downstream of residue 105 of the FIX polypeptide” means that the fusion polypeptide comprises an XTEN immediately downstream of an amino acid which corresponds to amino acid 105 in the R338L FIX variant (SEQ ID NO: 2), e.g., bounded by amino acids corresponding to amino acids 105 and 106 of the R338L FIX variant.

[0080] A “fusion” or “chimeric” protein comprises a first amino acid sequence linked to a second amino acid sequence with which it is not naturally linked in nature. The amino acid sequences which normally exist in separate proteins can be brought together in the fusion polypeptide, or the amino acid sequences which normally exist in the same protein can be placed in a new arrangement in the fusion polypeptide, e.g., fusion of a FIX domain of the disclosure with an Ig Fc domain. A fusion protein is created, for example, by chemical synthesis, or by creating and translating a polynucleotide in which the peptide regions are encoded in the desired relationship. A fusion protein can further comprise a second amino acid sequence associated with the first amino acid sequence by a covalent, non-peptide bond or a non-covalent bond.

[0081] The terms “heterologous” and “heterologous moiety” mean that a polynucleotide, polypeptide, or other moiety is derived from a distinct entity from that of the entity to which it is being compared. For instance, a heterologous polypeptide can be synthetic, or derived from a different species, different cell type of an individual, or the same or different type of cell of distinct individuals. In one aspect, a heterologous moiety is a polypeptide fused to another polypeptide to produce a fusion polypeptide or protein. In another aspect, a heterologous moiety is a non-polypeptide such as PEG conjugated to a polypeptide or protein.

[0082] As used herein, the term “half-life” refers to a biological half-life of a particular polypeptide in vivo. Half-life may be represented by the time required for half the quantity administered to a subject to be cleared from the circulation and/or other tissues in the animal. When a clearance curve of a given polypeptide is constructed as a function of time, the curve is usually biphasic with a rapid α-phase and longer β-phase. The α-phase typically represents an equilibration of the administered polypeptide between the intra- and extra-vascular space and is, in part, determined by the size of the polypeptide. The β-phase typically represents the catabolism of the polypeptide in the intravascular space. In some embodiments, FIX and fusion proteins comprising FIX are monophasic, and thus do not have an alpha phase, but just the single beta phase. Therefore, in certain embodiments, the term half-life as used herein refers to the half-life of the polypeptide in the β-phase. The typical β-phase half-life of a human antibody in humans is 21 days.

[0083] The terms “linked” and “fused” as used herein refers to a first amino acid sequence or nucleotide sequence covalently or non-covalently joined to a second amino acid sequence or nucleotide sequence, respectively. The first amino acid or nucleotide sequence can be directly joined or juxtaposed to the second amino acid or nucleotide sequence or alternatively an intervening sequence can covalently join the first sequence to the second sequence. The term “linked” means not only a fusion of a first amino acid sequence to a second amino acid sequence at the C-terminus or the N-terminus, but also includes insertion of the whole first amino acid sequence (or the second amino acid sequence) into any two amino acids in the second amino acid sequence (or the first amino acid sequence, respectively). In one embodiment, the first amino acid sequence is linked to a second amino acid sequence by a peptide bond or a linker. The first nucleotide sequence can be linked to a second nucleotide sequence by a phosphodiester bond or a linker. The linker can be a peptide or a polypeptide (for polypeptide chains) or a nucleotide or a nucleotide chain (for nucleotide chains) or any chemical moiety (for both polypeptide and polynucleotide chains). The term “linked” is also indicated by a hyphen (-).

[0084] As used herein the term “associated with” refers to a covalent or non-covalent bond formed between a first amino acid chain and a second amino acid chain. In one embodiment, the term “associated with” means a covalent, non-peptide bond or a non-covalent bond. This association can be indicated by a colon, i.e., (:). In another embodiment, it means a covalent bond except a peptide bond. For example, the amino acid cysteine comprises a thiol group that can form a disulfide bond or bridge with a thiol group on a second cysteine residue. In most naturally occurring IgG molecules, the CH1 and CL regions are associated by a disulfide bond and the two heavy chains are associated by two disulfide bonds at positions corresponding to 239 and 242 using the Kabat numbering system (position 226 or 229, EU numbering system). Examples of covalent bonds include, but are not limited to, a peptide bond, a metal bond, a hydrogen bond, a disulfide bond, a sigma bond, a pi bond, a delta bond, a glycosidic bond, an agnostic bond, a bent bond, a dipolar bond, a Pi backbond, a double bond, a triple bond, a quadruple bond, a quintuple bond, a sextuple bond, conjugation, hyperconjugation, aromaticity, hapticity, or antibonding. Non-limiting examples of non-covalent bond include an ionic bond (e.g., cation-pi bond or salt bond), a metal bond, an hydrogen bond (e.g., dihydrogen bond, dihydrogen complex, low-barrier hydrogen bond, or symmetric hydrogen bond), van der Walls force, London dispersion force, a mechanical bond, a halogen bond, aurophilicity, intercalation, stacking, entropic force, or chemical polarity.

[0085] As used herein, the term “cleavage site” or “enzymatic cleavage site” refers to a site recognized by an enzyme. Certain enzymatic cleavage sites comprise an intracellular processing site. In one embodiment, a polypeptide has an enzymatic cleavage site cleaved by an enzyme that is activated during the clotting cascade, such that cleavage of such sites occurs at the site of clot formation. Exemplary such sites include, e.g., those recognized by thrombin, Factor XIa or Factor Xa. Exemplary FXIa cleavage sites include, e.g., TQSFNDFTR (SEQ ID NO: 166) and SVSQTSKLTR (SEQ ID NO: 167). Exemplary thrombin cleavage sites include, e.g., DFLAEGGGVR (SEQ ID NO: 168), TTKIKPR (SEQ ID NO: 169), LVPRG (SEQ ID NO: 170) and ALRPR (SEQ ID NO: 171). Other enzymatic cleavage sites are known in the art.

[0086] As used herein, the term “processing site” or “intracellular processing site” refers to a type of enzymatic cleavage site in a polypeptide which is a target for enzymes that function after translation of the polypeptide. In one embodiment, such enzymes function during transport from the Golgi lumen to the trans-Golgi compartment. Intracellular processing enzymes cleave polypeptides prior to secretion of the protein from the cell. Examples of such processing sites include, e.g., those targeted by the PACE/furin (where PACE is an acronym for Paired basic Amino acid Cleaving Enzyme) family of endopeptidases. These enzymes are localized to the Golgi membrane and cleave proteins on the carboxyterminal side of the sequence motif Arg-[any residue]-(Lys or Arg)-Arg. As used herein the “furin” family of enzymes includes, e.g., PCSK1 (also known as PC1/Pc3), PCSK2 (also known as PC2), PCSK3 (also known as furin or PACE), PCSK4 (also known as PC4), PCSK5 (also known as PC5 or PC6), PCSK6 (also known as PACE4), or PCSK7 (also known as PC7/LPC, PC8, or SPC7). Other processing sites are known in the art. The term “processable linker” referred to herein means a linker comprising an intracellular processing site.

[0087] In constructs that include more than one processing or cleavage site, it will be understood that such sites may be the same or different.

[0088] A “processable linker” as used herein refers to a linker comprising at least one intracellular processing site, which is described elsewhere herein.

[0089] “Baseline,” as used herein, is the lowest measured plasma FIX level in a subject prior to administering a dose. The FIX plasma levels can be measured at two time points prior to dosing: at a screening visit and immediately prior to dosing. Alternatively, (a) the baseline in subjects whose pretreatment FIX activity is <1%, who have no detectable FIX antigen, and have nonsense genotypes can be defined as 0%, (b) the baseline for subjects with pretreatment FIX activity ≤1% and who have detectable FIX antigen can be set at 0.5%, (c) the baseline for subjects whose pretreatment FIX activity is between 1-2% is Cmin (the lowest activity throughout the PK study), and (d) the baseline for subjects whose pretreatment FIX activity is ≥2% can be set at 2%.

[0090] “Subject,” as used herein means a human. Subject as used herein includes an individual who is known to have at least one incidence of uncontrolled bleeding episodes, who has been diagnosed with a disease or disorder associated with uncontrolled bleeding episodes, e.g., a bleeding disease or disorder, e.g., hemophilia B, who are susceptible to uncontrolled bleeding episodes, e.g., hemophilia, or any combinations thereof. Subjects can also include an individual who is in danger of one or more uncontrollable bleeding episodes prior to a certain activity, e.g., a surgery, a sport activity, or any strenuous activities. The subject can have a baseline FIX activity less than 1%, less than 0.5%, less than 2%, less than 2.5%, less than 3%, or less than 4%. Subjects also include pediatric humans. Pediatric human subjects are birth to 20 years, preferably birth to 18 years, birth to 16 years, birth to 15 years, birth to 12 years, birth to 11 years, birth to 6 years, birth to 5 years, birth to 2 years, and 2 to 11 years of age.

[0091] Treat, treatment, treating, as used herein refers to, e.g., the reduction in severity of a disease or condition; the reduction in the duration of a disease course; the amelioration of one or more symptoms associated with a disease or condition; the provision of beneficial effects to a subject with a disease or condition, without necessarily curing the disease or condition, or the prophylaxis of one or more symptoms associated with a disease or condition. In one embodiment, the term “treating” or “treatment” means maintaining a FIX trough level at least about 1 IU/dL, 2 IU/dL, 3 IU/dL, 4 IU/dL, 5 IU/dL, 6 IU/dL, 7 IU/dL, 8 IU/dL, 9 IU/dL, 10 IU/dL, 11 IU/dL, 12 IU/dL, 13 IU/dL, 14 IU/dL, 15 IU/dL, 16 IU/dL, 17 IU/dL, 18 IU/dL, 19 IU/dL, or 20 IU/dL in a subject by administering a fusion protein of the disclosure. In another embodiment, treating or treatment means maintaining a FIX trough level between about 1 and about 20 IU/dL, about 2 and about 20 IU/dL, about 3 and about 20 IU/dL, about 4 and about 20 IU/dL, about 5 and about 20 IU/dL, about 6 and about 20 IU/dL, about 7 and about 20 IU/dL, about 8 and about 20 IU/dL, about 9 and about 20 IU/dL, or about 10 and about 20 IU/dL. Treatment or treating of a disease or condition can also include maintaining FIX activity in a subject at a level comparable to at least about 1%, 2%, 3%, 4%, 5%, 6%, 7%, 8%, 9%, 10%, 11%, 12%, 13%, 14%, 15%, 16%, 17%, 18%, 19%, or 20% of the FIX activity in a non-hemophiliac subject. The minimum trough level required for treatment can be measured by one or more known methods and can be adjusted (increased or decreased) for each person.

[0092] Hemostatic disorder, as used herein, means a genetically inherited or acquired condition characterized by a tendency to hemorrhage, either spontaneously or as a result of trauma, due to an impaired ability or inability to form a fibrin clot. Examples of such disorders include the hemophilias. The three main forms are hemophilia A (Factor VIII deficiency), hemophilia B (Factor IX deficiency or “Christmas disease”) and hemophilia C (Factor XI deficiency, mild bleeding tendency). Other hemostatic disorders include, e.g., Von Willebrand disease, Factor XI deficiency (PTA deficiency), Factor XII deficiency, deficiencies or structural abnormalities in fibrinogen, prothrombin, Factor V, Factor VII, Factor X or Factor XIII, Bernard-Soulier syndrome, which is a defect or deficiency in GPIb. GPIb, the receptor for VWF, can be defective and lead to lack of primary clot formation (primary hemostasis) and increased bleeding tendency), and thrombasthenia of Glanzman and Naegeli (Glanzmann thrombasthenia). In liver failure (acute and chronic forms), there is insufficient production of coagulation factors by the liver; this may increase bleeding risk.

[0093] As used herein the term “acute bleeding” refers to a bleeding episode regardless of the underlying cause. For example, a subject may have trauma, uremia, a hereditary bleeding disorder (e.g., Factor VII deficiency) a platelet disorder, or resistance owing to the development of antibodies to clotting factors.

### II. Fix Fusion Proteins

[0094] The present disclosure is directed to subcutaneous administration of a FIX fusion protein comprising a FIX polypeptide and at least one heterologous moiety inserted within the FIX polypeptide, fused to the C-terminus of the FIX polypeptide, or both. Certain aspects of the present disclosure are directed to subcutaneous administration of a FIX fusion protein comprising a FIX polypeptide and a heterologous moiety, e.g., an Fc region, wherein the FIX polypeptide comprises a R338L mutation (Padua mutation). The FIX fusion protein, after the insertion of or the fusion to the heterologous moiety, can retain one or more FIX activities. In one embodiment, the FIX activity is a procoagulant activity. The term “procoagulant activity” is meant the ability of the FIX protein of the disclosure to participate in the clotting cascade in blood, substituting for native FIX. For example, a recombinant FIX protein of the disclosure has procoagulant activity when it can convert Factor X (FX) to activated Factor X (FXa) in the presence of Factor VIII (FVIII), as tested, e.g., in a chromogenic assay. In another embodiment, the FIX activity is an ability to generate a tenase complex. In other embodiments, the FIX activity is an ability to generate thrombin (or a clot).

[0095] A recombinant FIX protein of the disclosure need not exhibit 100% of the procoagulant activity of native mature human FIX. In fact, in certain aspects a heterologous moiety inserted into a FIX polypeptide of the disclosure can increase the half-life or stability of the protein significantly, such that lower activity is perfectly acceptable. Thus, in certain aspects, a FIX fusion protein of the disclosure has at least about 10%, about 20%, about 30%, about 40%, about 50%, about 60%, about 70%, about 80%, about 90% or about 100% of the procoagulant activity of native FIX. However in some disclosure embodiments, the, recombinant FIX protein of the disclosure could have greater than 100% of native FIX activity for proteins containing the FIX Padua R338L high activity variant, for example, at least about 105%, 110%, 120%, 130%, 140%, 150%, 160%, 170%, 180%, 190% or 200% or more of that activity.

[0096] Procoagulant activity can be measured by any suitable in vitro or in vivo assay. The activity of FIX can be measured either downstream of the coagulation cascade by monitoring the generation of a clot (clotting assays), or upstream by measuring directly the enzymatic activity of FX following activation by the FVIII-FIX complex (chromogenic assays) (see, e.g., Barrowcliffe et al., Semin. Thromb. Haemost. 28: 247-56 (2002); Lee et al., Thromb. Haemost. 82: 1644-47 (1999); Lippi et al., Clin. Chem. Lab. Med. 45: 2-12 (2007); Matsumoto et al., J. Thromb. Haemost. 4: 377-84 (2006)). Thus, procoagulant activity can be measured using a chromogenic substrate assay, a clotting assay (e.g., a one stage or a two stage clotting assay), or both. The chromogenic assay mechanism is based on the principles of the blood coagulation cascade, where activated FIX converts FX into FXa in the presence of FVIII, phospholipids and calcium ions. The FXa activity is assessed by hydrolysis of a p-nitroanilide (pNA) substrate specific to FXa. The initial rate of release of p-nitroaniline measured at 405 nM is directly proportional to the FXa activity and thus to the FIX activity in the sample. The chromogenic assay is recommended by the Factor VIII and Factor IX Subcommittee of the Scientific and Standardization Committee (SSC) of the International Society on Thrombosis and Hemostasis (ISTH).

[0097] Other suitable assays useful to determine pro-coagulant activity include those disclosed, e.g., in U.S. Application Publication No. 2010/0022445 to Scheiflinger and Dockal, which is incorporated herein by reference in its entirety.

[0098] In certain aspects the procoagulant activity of a recombinant FIX protein of the disclosure is compared to native mature FIX, in certain aspects it is compared to an international standard.

[0099] The at least one heterologous moiety, as described in more detail below, can comprise any heterologous moiety or can be a moiety that can provide an improved property to the FIX protein. For example, in one aspect, a heterologous moiety useful for the disclosure can be a moiety that is capable of extending a half-life of the FIX protein or a moiety that is capable of improving stability of the FIX protein. The FIX fusion protein of the disclosure can have more than one heterologous moieties inserted in or fused to the FIX polypeptide. In one embodiment, the more than one heterologous moieties are identical. In another embodiments, the more than one heterologous moieties are different. In other embodiments, the heterologous moiety is selected from the group consisting of an XTEN, an albumin, an albumin binding peptide, an albumin small binding molecule, an Fc domain, an FcRn binding partner, a PAS, a CTP, a PEG, an HES, a PSA, or any combination thereof.

[0100] In some embodiments, at least one heterologous moiety is inserted within a domain of the FIX polypeptide, but not between the domains. A FIX polypeptide comprises multiple domains, e.g., a γ-carboxyglutamic acid (GLA) domain, an epidermal growth factor-like 1 (EGF1) domain, an epidermal growth factor-like 2 (EGF2) domain, an activation peptide (AP) domain, a linker between the EGF2 domain and the AP domain, and a catalytic domain (e.g., a serine protease domain). A FIX zymogen comprises 461 amino acids: amino acids 1-28 (corresponding to SEQ ID NO: 3) is a signal peptide; amino acids 29-46 (corresponding to SEQ ID NO: 3) is a propeptide; followed by the 415 amino acid FIX protein sequence. This 415 processed FIX comprises amino acids 1-145 (corresponding to SEQ ID NO: 1 or SEQ ID NO: 2) is a FIX light chain; amino acids 146-180 is an activation peptide; and amino acids 181 to 415 (corresponding to SEQ ID NO: 1 or SEQ ID NO: 2) is the catalytic FIX heavy chain. Within the light and heavy chains, the GLA domain corresponds to amino acids 1 to 46 of SEQ ID NO: 1 or SEQ ID NO: 2; the EGF1 domain corresponds to amino acids 47 to 84 of SEQ ID NO: 1 or SEQ ID NO: 2; the EGF2 domain corresponds to amino acids 85 to 127 of SEQ ID NO: 1 or SEQ ID NO: 2; the linker between the EGF2 domain and the AP domain corresponds to amino acids 128 to 145 of SEQ ID NO: 1 or SEQ ID NO: 2; the AP domain corresponds to amino acids 146 to 180 of SEQ ID NO: 1 or SEQ ID NO: 2; and the catalytic domain corresponds to amino acids 181 to 415 of SEQ ID NO: 1 or SEQ ID NO: 2

[0101] In certain embodiments, at least one heterologous moiety is inserted within one or more domains of a FIX polypeptide. For example, at least one heterologous moiety, e.g., XTEN, can be inserted within a domain selected from the group consisting of the GLA domain, the EGF1 domain, the EGF2 domain, the AP domain, the linker between the EGF2 domain and the AP domain, the catalytic domain, and any combination thereof. In one particular embodiment, the at least one heterologous moiety, e.g., XTEN, is inserted within the GLA domain, e.g., amino acids 1 to 46 of SEQ ID NO: 1 or SEQ ID NO: 2. In one particular embodiment, the at least one heterologous moiety, e.g., XTEN, is inserted within the EGF1 domain, e.g., amino acids 47 to 83 of SEQ ID NO: 1 or SEQ ID NO: 2. In one particular embodiment, the at least one heterologous moiety, e.g., XTEN, is inserted within the EGF2 domain, e.g., amino acids 84 to 125 of SEQ ID NO: 1 or SEQ ID NO: 2. In some embodiments, the at least one heterologous moiety, e.g., XTEN, is inserted within the linker between the EGF2 domain and the AP domain, e.g., amino acids 132 to 145 of SEQ ID NO: 1 or SEQ ID NO: 2. In one particular embodiment, the at least one heterologous moiety, e.g., XTEN, is inserted within the AP domain, e.g., amino acids 146 to 180 of SEQ ID NO: 1 or SEQ ID NO: 2. In some embodiments, the at least one heterologous moiety, e.g., XTEN, is inserted within the catalytic domain, e.g., amino acids 181 to 415 of SEQ ID NO: 1 or SEQ ID NO: 2.

[0102] In some embodiments, one or more heterologous moieties can be inserted within various insertion sites. In certain embodiments, the insertions of at least one heterologous moiety, e.g., an XTEN, at one or more of these sites do not result in a loss of FIX activity and/or induce an improved property of the FIX protein. For example, at least one heterologous moiety can be inserted within the FIX polypeptide at an insertion site corresponding to an amino acid selected from the group consisting of amino acid 103 of SEQ ID NO: 2 (i.e., immediately downstream of an amino acid corresponding to amino acid 103 of SEQ ID NO: 2), amino acid 105 of SEQ ID NO: 2 (i.e., immediately downstream of an amino acid corresponding to amino acid 105 of SEQ ID NO: 2), amino acid 142 of SEQ ID NO: 2 (i.e., immediately downstream of an amino acid corresponding to amino acid 142 of SEQ ID NO: 2), amino acid 149 of SEQ ID NO: 2 (i.e., immediately downstream of an amino acid corresponding to amino acid 149 of SEQ ID NO: 2), amino acid 162 of SEQ ID NO: 2 (i.e., immediately downstream of an amino acid corresponding to amino acid 162 of SEQ ID NO: 2), amino acid 166 of SEQ ID NO: 2 (i.e., immediately downstream of an amino acid corresponding to amino acid 166 of SEQ ID NO: 2), amino acid 174 of SEQ ID NO: 2 (i.e., immediately downstream of an amino acid corresponding to amino acid 174 of SEQ ID NO: 2), amino acid 224 of SEQ ID NO: 2 (i.e., immediately downstream of an amino acid corresponding to amino acid 224 of SEQ ID NO: 2), amino acid 226 of SEQ ID NO: 2 (i.e., immediately downstream of an amino acid corresponding to amino acid 226 of SEQ ID NO: 2), amino acid 228 of SEQ ID NO: 2 (i.e., immediately downstream of an amino acid corresponding to amino acid 228 of SEQ ID NO: 2), amino acid 413 of SEQ ID NO: 2 (i.e., immediately downstream of an amino acid corresponding to amino acid 413 of SEQ ID NO: 2) and any combination thereof, wherein the FIX fusion protein exhibits procoagulant activity.

[0103] In one embodiment, the heterologous moiety, e.g., XTEN, is inserted within the FIX polypeptide at an insertion site corresponding to an amino acid selected from the group consisting of amino acid 149 of SEQ ID NO: 1 or SEQ ID NO: 2, amino acid 162 of SEQ ID NO: 1 or SEQ ID NO: 2, amino acid 166 of SEQ ID NO: 1 or SEQ ID NO: 2, amino acid 174 of SEQ ID NO: 1 or SEQ ID NO: 2 and any combination thereof. In another embodiment, the heterologous moiety, e.g., XTEN, is inserted within the FIX polypeptide at an insertion site corresponding to an amino acid selected from the group consisting of amino acid 224 of SEQ ID NO: 1 or SEQ ID NO: 2, amino acid 226 of SEQ ID NO: 1 or SEQ ID NO: 2, amino acid 228 of SEQ ID NO: 1 or SEQ ID NO: 2, amino acid 413 of SEQ ID NO: 1 or SEQ ID NO: 2, and any combination thereof. In other embodiments, the heterologous moiety, e.g., XTEN, is inserted within the FIX polypeptide at an insertion site corresponding to an amino acid selected from the group consisting of amino acid 103 of SEQ ID NO: 1 or SEQ ID NO: 2, amino acid 105 of SEQ ID NO: 1 or SEQ ID NO: 2, and both. In another embodiment, the heterologous moiety, e.g., XTEN, is inserted within the FIX polypeptide at an insertion site corresponding to amino acid 142 of SEQ ID NO: 1 or SEQ ID NO: 2.

[0104] As discussed in more detail below, the heterologous moiety can be an XTEN, which can be of varying lengths. For example, the XTEN can comprise at least about 42 amino acids, at least about 72 amino acids, at least about 144 amino acids, at least about 288 amino acids, or at least about 864 amino acids. In some embodiments, the XTEN is selected from the group consisting of AE42, AG42, AE72, AG72, AE144, AG144, AE288, AG288, AE864, and AG864. Non-limiting examples of the XTENs that can be inserted in or fused to a FIX polypeptide are included elsewhere herein.

[0105] In some embodiments, an XTEN comprising 42 amino acids, e.g., AE42 or AG42, is inserted within the FIX polypeptide at an insertion site corresponding to an amino acid selected from the group consisting of amino acid 103 of SEQ ID NO: 1 or 2, amino acid 105 of SEQ ID NO: 1 or 2, amino acid 142 of SEQ ID NO: 1 or 2, amino acid 149 of SEQ ID NO: 1 or 2, amino acid 162 of SEQ ID NO: 1 or 2, amino acid 166 of SEQ ID NO: 1 or 2, amino acid 174 of SEQ ID NO: 1 or 2, amino acid 224 of SEQ ID NO: 1 or 2, amino acid 226 of SEQ ID NO: 1 or 2, amino acid 228 of SEQ ID NO: 1 or 2, amino acid 413 of SEQ ID NO: 1 or 2 and any combination thereof, wherein the FIX fusion protein exhibits procoagulant activity.

[0106] In some embodiments, an XTEN comprising 72 amino acids, e.g., AE72 or AG72, is inserted within the FIX polypeptide at an insertion site corresponding to an amino acid selected from the group consisting of amino acid 149 of SEQ ID NO: 1 or 2, amino acid 162 of SEQ ID NO: 1 or 2, amino acid 166 of SEQ ID NO: 1 or 2, amino acid 174 of SEQ ID NO: 1 or 2, amino acid 224 of SEQ ID NO: 1 or 2, amino acid 226 of SEQ ID NO: 1 or 2, amino acid 228 of SEQ ID NO: 1 or 2, amino acid 413 of SEQ ID NO: 1 or 2 and any combination thereof, or the XTEN is fused to the C-terminus, wherein the FIX fusion protein exhibits procoagulant activity.

[0107] In some embodiments, an XTEN comprising 144 amino acids, e.g., AE144 or AG144, is inserted within the FIX polypeptide at an insertion site corresponding to an amino acid selected from the group consisting of amino acid 149 of SEQ ID NO: 1 or 2, amino acid 162 of SEQ ID NO: 1 or 2, amino acid 166 of SEQ ID NO: 1 or 2, amino acid 174 of SEQ ID NO: 1 or 2, amino acid 224 of SEQ ID NO: 1 or 2, amino acid 226 of SEQ ID NO: 1 or 2, amino acid 228 of SEQ ID NO: 1 or 2,amino acid 413 of SEQ ID NO: 1 or 2 and any combination thereof, wherein the FIX fusion protein exhibits procoagulant activity.

[0108] In some embodiments, an XTEN comprising 288 amino acids, e.g., AE288 or AG288, is inserted within the FIX polypeptide at an insertion site corresponding to an amino acid selected from the group consisting of amino acid 149 of SEQ ID NO: 1 or 2, amino acid 162 of SEQ ID NO: 1 or 2, amino acid 166 of SEQ ID NO: 1 or 2, amino acid 174 of SEQ ID NO: 1 or 2, amino acid 224 of SEQ ID NO: 1 or 2, amino acid 226 of SEQ ID NO: 1 or 2, amino acid 228 of SEQ ID NO: 1 or 2, amino acid 413 of SEQ ID NO: 1 or 2 and any combination thereof, wherein the FIX fusion protein exhibits procoagulant activity.

[0109] In still other embodiments, an XTEN comprising 864 amino acids, e.g., AE864 or AG8648, is inserted within the FIX polypeptide at an insertion site corresponding to an amino acid selected from the group consisting of amino acid 149 of SEQ ID NO: 1 or 2, amino acid 162 of SEQ ID NO: 1 or 2, amino acid 166 of SEQ ID NO: 1 or 2, amino acid 174 of SEQ ID NO: 1 or 2, amino acid 224 of SEQ ID NO: 1 or 2, amino acid 224 of SEQ ID NO: 1 or 2, amino acid 226 of SEQ ID NO: 1 or 2, amino acid 228 of SEQ ID NO: 1 or 2, amino acid 413 of SEQ ID NO: 1 or 2 and any combination thereof, wherein the FIX fusion protein exhibits procoagulant activity.

[0110] The FIX fusion protein of the present disclosure can further comprise a second heterologous moiety, e.g., a second XTEN, inserted within the FIX, fused to the C-terminus of the FIX, or both. The second heterologous moiety can be inserted within the FIX polypeptide at an insertion site corresponding to an amino acid selected from the group consisting of amino acid 103 of SEQ ID NO: 1 or 2, amino acid 105 of SEQ ID NO: 1 or 2, amino acid 142 of SEQ ID NO: 1 or 2, amino acid 149 of SEQ ID NO: 1 or 2, amino acid 162 of SEQ ID NO: 1 or 2, amino acid 166 of SEQ ID NO: 1 or 2, amino acid 174 of SEQ ID NO: 1 or 2, amino acid 224 of SEQ ID NO: 1 or 2, amino acid 226 of SEQ ID NO: 1 or 2, amino acid 228 of SEQ ID NO: 1 or 2, amino acid 413 of SEQ ID NO: 1 or 2, and any combination thereof or wherein the second XTEN is fused to the C-terminus of the FIX polypeptide. In some embodiments, the first XTEN and the second XTEN are inserted within the FIX polypeptide at insertion sites corresponding to an amino acid of SEQ ID NO: 1 or 2 and/or fused to the C-terminus of the FIX polypeptide selected from the group consisting of amino acid 105 of SEQ ID NO: 1 or 2 and amino acid 166 of SEQ ID NO: 1 or 2; amino acid 105 of SEQ ID NO: 1 or 2 and amino acid 224 of SEQ ID NO: 1 or 2; amino acid 105 of SEQ ID NO: 1 or 2 and fused to the C-terminus; amino acid 166 of SEQ ID NO: 1 or 2 and amino acid 224 of SEQ ID NO: 1 or 2; amino acid 166 of SEQ ID NO: 1 or 2 and fused to the C-terminus; and amino acid 224 of SEQ ID NO: 1 or 2 and fused to the C-terminus, respectively. In one embodiment, the first XTEN is inserted within the FIX polypeptide at an insertion site corresponding to amino acid 166 of SEQ ID NO: 1 or 2, and the second XTEN is fused to the C-terminus of the FIX polypeptide.

[0111] The second XTEN can comprise at least about 6 amino acids, at least about 12 amino acids, at least about 36 amino acids, at least about 42 amino acids, at least about 72 amino acids, at least about 144 amino acids, or at least about 288 amino acids. In some embodiments, the second XTEN comprises 6 amino acids, 12 amino acids, 36 amino acids, 42 amino acids, 72 amino acids, 144 amino acids, or 288 amino acids. The second XTEN can be selected from the group consisting of AE42, AE72, AE864, AE576, AE288, AE144, AG864, AG576, AG288, AG144, and any combination thereof. In one particular embodiment, the second XTEN is AE72 or AE144.

[0112] In one particular embodiment, the second XTEN comprises an amino acid sequence at least about 80%, at least about 85%, at least about 90%, at least about 95%, at least about 96%, at least about 97%, at least about 98%, at least about 99%, or about 100% identical to an amino acid sequence selected from the group consisting of SEQ ID NOs: 34, 35, 36, 37, 38, 39, 40, 41, 42, 43, 44, 45, 46, 47, 48, 49, 50, 51, 52, 53, and any combination thereof.

[0113] In some embodiments, the FIX fusion protein further comprises a third, a fourth, a fifth, and/or a sixth XTEN.

[0114] In some embodiments, the FIX fusion protein comprises an amino acid sequence at least about 80%, at least about 85%, at least about 90%, at least about 95%, at least about 96%, at least about 97%, at least about 98%, at least about 99%, or about 100% identical to a sequence selected from the group consisting of SEQ ID NO: 54 to SEQ ID NO: 153 without the signal peptide and the propeptide sequence. In certain embodiments, the FIX fusion protein comprises an amino acid sequence selected from the group consisting of SEQ ID NO: 54 to SEQ ID NO: 153 without the signal peptide and the propeptide sequence. In one embodiment, the FIX fusion protein comprises an amino acid sequence at least about 80%, at least about 85%, at least about 90%, at least about 95%, at least about 96%, at least about 97%, at least about 98%, at least about 99%, or about 100% identical to a sequence selected from the group consisting of SEQ ID NOs: 119, 120, 121, and 123 without the signal peptide and the propeptide sequence. In another embodiment, the FIX fusion protein comprises an amino acid sequence selected from the group consisting of SEQ ID NOs: 119, 120, 123, 121 and 226 or 122 without the signal peptide and the propeptide sequence. In some embodiments, the FIX fusion protein is selected from group consisting of FIX-AP.72, FIX-AP.144, FIX-CT.72, FIX-CT.144, FIX-AP.288, and FIX-CT.288 without the signal peptide and the propeptide sequence.

[0115] In some embodiments, the FIX fusion protein comprises two different types of heterologous moieties. In some embodiments, the FIX fusion protein comprises a FIX polypeptide, an XTEN, and an Fc domain (or an FcRn binding partner) or a fragment thereof. In some embodiments, the XTEN is inserted within the FIX, and the Fc domain (or an FcRn binding partner) or a fragment thereof is fused to the C-terminus of the FIX. In some embodiments, the XTEN is inserted within the FIX polypeptide at one or more insertion sites selected from the insertion sites listed in table 3. In one embodiment, the XTEN is inserted within the FIX polypeptide at an insertion site corresponding to an amino acid selected from the group consisting of amino acid 103 of SEQ ID NO: 1 or 2, amino acid 105 of SEQ ID NO: 1 or 2, amino acid 142 of SEQ ID NO: 1 or 2, amino acid 149 of SEQ ID NO: 1 or 2, amino acid 162 of SEQ ID NO: 1 or 2, amino acid 166 of SEQ ID NO: 1 or 2, amino acid 174 of SEQ ID NO: 1 or 2, amino acid 224 of SEQ ID NO: 1 or 2, amino acid 226 of SEQ ID NO: 1 or 2, amino acid 228 of SEQ ID NO: 1 or 2, and amino acid 413 of SEQ ID NO: 1 or 2; and the Fc domain (or an FcRn binding partner) or a fragment thereof is fused to the C-terminus of the FIX. In certain embodiments, the XTEN is inserted within the FIX polypeptide at an insertion site corresponding to an amino acid selected from the group consisting of amino acid 105 of SEQ ID NO: 1 or 2, amino acid 166 of SEQ ID NO: 1 or 2, and amino acid 224 of SEQ ID NO: 1 or 2; and the Fc domain (or an FcRn binding partner) or a fragment thereof is fused to the C-terminus of the FIX. In some embodiments, the XTEN is selected from AE42, AE72, and AE144.

[0116] In certain aspects of the disclosure, the FIX fusion protein comprises one or two polypeptide chains. In one embodiment, the FIX fusion protein comprises two polypeptide chains, wherein the first polypeptide chain comprises the FIX polypeptide fused to an Fc domain (or an FcRn binding partner), and the second polypeptide chain comprises a second Fc domain, wherein the first Fc domain (or an FcRn binding partner) and the second Fc domain (or an FcRn binding partner) are associated by a covalent bond.

[0117] In another embodiment, the FIX fusion protein comprises a single polypeptide chain comprising a FIX polypeptide and an Fc domain (or an FcRn binding partner). In one particular embodiment, the FIX fusion protein further comprises a linker, which links the FIX polypeptide and the Fc domain (or an FcRn binding partner). In another embodiment, the FIX fusion protein comprises a FIX polypeptide, an Fc domain, and a second Fc domain (or an FcRn binding partner). In one particular embodiment, the FIX fusion protein further comprises a linker, which links the Fc domain (or an FcRn binding partner) and the second Fc domain (or an FcRn binding partner). In another embodiment, the FIX fusion protein comprises a FIX polypeptide, an Fc domain (or an FcRn binding partner), and a second Fc domain (or an FcRn binding partner), wherein the FIX polypeptide is linked to the Fc domain (or an FcRn binding partner) by a linker. In another embodiment, the FIX fusion protein comprises a FIX polypeptide, an Fc domain (or an FcRn binding partner), and a second Fc domain (or an FcRn binding partner), wherein the FIX polypeptide is linked to the Fc domain (or an FcRn binding partner) by a first linker, and wherein the Fc domain (or an FcRn binding partner) is linked to the second Fc domain (or an FcRn binding partner) by a linker. In certain embodiments, the FIX fusion protein comprises a formula selected from the group consisting of:

[0118] (i) FIX(X)-F1;

[0119] (ii) FIX(X)-L1-F1;

[0120] (iii) FIX(X)-F1-F2;

[0121] (iv) FIX(X)-L1-F1-F2;

[0122] (v) FIX(X)-L1-F1-L2-F2;

[0123] (vi) FIX(X)-F1-L1-F2;

[0124] (vii) FIX(X)-F1:F2;

[0125] (viii) FIX(X)-L1-F1:F2; and

[0126] (ix) any combination thereof,

wherein FIX(X) is a FIX polypeptide having an XTEN inserted one or more insertion sites described herein; each of L1 and L2 is a linker; F1 is an Fc domain or an FcRn binding partner; F2 is a second Fc domain or a second FcRn binding partner, (-) is a peptide bond or one or more amino acids; and (:) is a covalent bond, e.g., a disulfide bond.

[0127] The linkers (L1 and L2) can be the same or different. The linker can be cleavable or non-cleavable, and the linker can comprise one or more intracellular processing sites. Non-limiting examples of the linkers are described elsewhere herein. Any of the linkers can be used to combine FIX with a heterologous moiety (e.g., XTEN or Fc) or a first heterologous moiety (e.g., first Fc) with a second heterologous moiety (e.g., second Fc)

[0128] In certain embodiments, the linker comprises a thrombin cleavage site. In one particular embodiment, the thrombin cleavage site comprises XVPR, wherein X is any aliphatic amino acid (e.g., glycine, alanine, valine, leucine, or isoleucine). In one particular embodiment, the thrombin cleave site comprises LVPR (SEQ ID NO: 231). In some embodiments, the linker comprises a PAR1 exosite interaction motif, which comprises SFLLRN (SEQ ID NO: 190). In some embodiments, the PAR1 exosite interaction motif further comprises an amino acid sequence selected from P, PN, PND, PNDK (SEQ ID NO: 191), PNDKY (SEQ ID NO: 192), PNDKYE (SEQ ID NO: 193), PNDKYEP (SEQ ID NO: 194), PNDKYEPF (SEQ ID NO: 195), PNDKYEPFW (SEQ ID NO: 196), PNDKYEPFWE (SEQ ID NO: 197), PNDKYEPFWED (SEQ ID NO: 198), PNDKYEPFWEDE (SEQ ID NO: 199), PNDKYEPFWEDEE (SEQ ID NO: 200), PNDKYEPFWEDEES (SEQ ID NO: 201), or any combination thereof. In other embodiments the linker comprises the FXIa cleavage site LDPR (SEQ ID NO: 232).

[0129] In one particular embodiment, the FIX fusion protein comprises a FIX polypeptide and a heterologous moiety, which comprises an XTEN, wherein the XTEN is fused with or without a linker, which linker may or may not be cleavable, to the C-terminus of the FIX polypeptide and comprises an amino acid sequence of longer than 42 amino acids and shorter than 864 amino acids in length, preferably shorter than 144 amino acids in length. The XTEN can comprise an amino acid sequence of longer than 42, 43, 44, 45, 46, 47, 48, 49, 50, 51, 52, 53, 54, 55, 56, 57, 58, 59, 60, 61, 62, 63, 64, 65, 66, 67, 68, 69, 70, or 71 amino acids and shorter than 140, 139, 138, 137, 136, 135, 134, 133, 132, 131, 130, 129, 128, 127, 126, 125, 124, 123, 122, 121, 120, 119, 118, 117, 116, 115, 114, 113, 112, 111, 110, 109, 108, 107, 106, 105, 104, 103, 102, 101, 100, 99, 98, 97, 96, 95, 94, 93, 92, 91, 90, 89, 88, 87, 86, 85, 84, 83, 82, 81, 80, 79, 78, 76, 75, 74, or 73 etc, amino acids or any combination thereof. In some embodiments, the XTEN is 72 amino acids in length. In one particular embodiment, the XTEN is AE72. In another embodiment, the XTEN comprises an amino acid sequence at least about 80%, at least about 85%, at least about 90%, at least about 95%, at least about 96%, at least about 97%, at least about 98%, at least about 99%, or 100% identical to SEQ ID NO: 35.

[0130] In some embodiments, the FIX fusion protein comprises a FIX polypeptide that contains at least one inserted XTEN sequence and a heterologous moiety comprising an XTEN, wherein the XTEN is fused with or without a linker, which linker may or may not be cleavable, to the C-terminus of the FIX polypeptide. In some embodiments, the XTEN is shorter than 864 amino acids in length, preferably shorter than 144 amino acids in length. In other embodiments, the XTEN comprises an amino acid sequence of shorter than 244, 140, 130, 120, 110, 100, 90, 80, or 75 amino acids in length.

[0131] In other embodiments, the FIX fusion protein comprises a formula selected from the group consisting of:

[0132] (i) FIX-X

[0133] (ii) FIX-L1-X

[0134] (iii) FIX(X)-X

[0135] (iv) FIX(X)-L1-X

[0136] (v) FIX(X)-L1: X

[0137] (vi) any combination thereof,

wherein FIX is a FIX polypeptide; FIX(X) is a FIX polypeptide having at least one XTEN inserted into one or more insertion sites described herein; (X) is an XTEN which is longer than 42 amino acids and shorter than 144 amino acids; X is an XTEN which is longer than 42 amino acids and shorter than 864 amino acids such as 288 amino acids, preferably shorter than 144 amino acids (e.g., an XTEN with 72 amino acids); L1 is a linker; (-) is a peptide bond or one or more amino acids; and (:) is a covalent bond, e.g., a disulfide bond.

[0138] The linker (L1) can be the same or different. The linker can be cleavable or non-cleavable as needed, and the linker can comprise one or more intracellular processing sites. Non-limiting examples of the linkers are described elsewhere herein. Any of the linkers can be used to combine FIX with a heterologous moiety (e.g., XTEN or Fc). The following are non-limiting examples of linkers that are suitable for many disclosure embodiments:

a)
(SEQ ID NO: 219, Thrombin);
GPEGPSKLTRAETGAGSPGAETAEQKLISEEDLSPATGHHHHHHHH
b)
(SEQ ID NO: 220, Thrombin-PAR1);
GAGSPGAETALVPRGAGSPGAETAG
c)
(SEQ ID NO: 221)
GAGSPGAETALVPRSFLLRNPNDKYEPFWEDEESGAGSPGAETA;
d)
(SEQ ID NO: 222)
GPEGPSKLTRAETGAGSPGAETA
e)
(SEQ ID NO: 223)
GGGGALRPRVVGGAGSPGAETA
f)
(SEQ ID NO: 224)
GGGGTLDPRSFLLRNPNDKYEPFWEDEEKGGAGSPGAETA
g)
(SEQ ID NO: 225)
GGAGSPGAETA

[0139] In certain other embodiments, the linker comprises a thrombin cleavage site. In one particular embodiment, the thrombin cleavage site comprises XVPR, wherein X is any aliphatic amino acid (e.g., glycine, alanine, valine, leucine, or isoleucine). In one particular embodiment, the thrombin cleave site comprises LVPR (SEQ ID NO: 231). In some embodiments, the linker comprises a PAR1 exosite interaction motif, which comprises SFLLRN (SEQ ID NO: 190). In some embodiments, the PAR1 exosite interaction motif further comprises an amino acid sequence selected from P, PN, PND, PNDK (SEQ ID NO: 191), PNDKY (SEQ ID NO: 192), PNDKYE (SEQ ID NO: 193), PNDKYEP (SEQ ID NO: 194), PNDKYEPF (SEQ ID NO: 195), PNDKYEPFW (SEQ ID NO: 196), PNDKYEPFWE (SEQ ID NO: 197), PNDKYEPFWED (SEQ ID NO: 198), PNDKYEPFWEDE (SEQ ID NO: 199), PNDKYEPFWEDEE (SEQ ID NO: 200), PNDKYEPFWEDEES (SEQ ID NO: 201), or any combination thereof. In certain other embodiment the linker comprises a FXIa cleavage site comprising LDPR (SEQ ID NO: 232), which can be combined with the PAR1 exosite interaction motif

[0140] In certain embodiments, the FIX polypeptide fused to an XTEN at the C-terminus can further comprise a second XTEN. The second XTEN can be fused to or inserted in any part of the FIX fusion protein, including but not limited to the insertion sites disclosed herein. The FIX fusion protein can further comprise a third XTEN, a fourth XTEN, a fifth XTEN, or a sixth XTEN.

[0141] The FIX fusion protein of the present disclosure maintains a level of activity compared to native FIX. In some embodiments, the FIX fusion protein has at least about 10%, at least about 20%, at least about 30%, at least about 40%, at least about 50%, at least about 60%, at least about 70%, at least about 80%, at least about 90% or 100% of the procoagulant activity of native FIX. Procoagulant activity can be measured by any method known in the art, including but not limited to a chromogenic substrate assay, a one stage clotting assay, or both.

[0142] II.A. Factor IX

[0143] Human Factor IX (FIX) is a serine protease that is an important component of the intrinsic pathway of the blood coagulation cascade. “Factor IX” or “FIX,” as used herein, refers to a coagulation factor protein and species and sequence variants thereof, and includes, but is not limited to, the 461 single-chain amino acid sequence of human FIX precursor polypeptide (“prepro”), the 415 single-chain amino acid sequence of mature human FIX (SEQ ID NO: 1), and the R338L FIX (Padua) variant (SEQ ID NO: 2). FIX includes any form of FIX molecule with the typical characteristics of blood coagulation FIX. As used herein “Factor IX” and “FIX” are intended to encompass polypeptides that comprise the domains Gla (region containing γ-carboxyglutamic acid residues), EGF1 and EGF2 (regions containing sequences homologous to human epidermal growth factor), activation peptide (“AP,” formed by residues R136-R180 of the mature FIX), and the C-terminal protease domain (“Pro”), or synonyms of these domains known in the art, or can be a truncated fragment or a sequence variant that retains at least a portion of the biological activity of the native protein. FIX or sequence variants have been cloned, as described in U.S. Pat. Nos. 4,770,999 and 7,700,734, and cDNA coding for human Factor IX has been isolated, characterized, and cloned into expression vectors (see, for example, Choo et al., Nature 299:178-180 (1982); Fair et al., Blood 64:194-204 (1984); and Kurachi et al., Proc. Natl. Acad. Sci., U.S.A. 79:6461-6464 (1982)). One particular variant of FIX, the R338L FIX (Padua) variant (SEQ ID NO: 2), characterized by Simioni et al, 2009, comprises a gain-of-function mutation, which correlates with a nearly 8-fold increase in the activity of the Padua variant relative to native FIX (Table 1). FIX variants can also include any FIX polypeptide having one or more conservative amino acid substitutions, which do not affect the FIX activity of the FIX polypeptide.

TABLE 1
Example FIX Sequences

```
SEQ ID NO: 1 (mature FIX polypeptide)
    1: YNSGKLEEFV QGNLERECME EKCSFEEARE VFENTERTTE FWKQYVDGDQ CESNPCLNGG
  61: SCKDDINSYE CWCPFGFEGK NCELDVTCNI KNGRCEQFCK NSADNKVVCS CTEGYRLAEN
121: QKSCEPAVPF PCGRVSVSQT SKLTRAETVF PDVDYVNSTE AETILDNITQ STQSFNDFTR
181: VVGGEDAKPG QFPWQVVLNG KVDAFCGGSI VNEKWIVTAA HCVETGVKIT VVAGEHNIEE
241: TEHTEQKRNV IRIIPHHNYN AAINKYNHDI ALLELDEPLV LNSYVTPICI ADKEYTNIFL
301: KFGSGYVSGW GRVFHKGRSA LVLQYLRVPL VDRATCLRST KFTIYNNMFC AGFHEGGRDS
361: CQGDSGGPHV TEVEGTSFLT GIISWGEECA MKGKYGIYTK VSRYVNWIKE KTKLT
SEQ ID NO: 2 (mature Padua (R338L) FIX Polypeptide)
    1: YNSGKLEEFV QGNLERECME EKCSFEEARE VFENTERTTE FWKQYVDGDQ CESNPCLNGG
  61: SCKDDINSYE CWCPFGFEGK NCELDVTCNI KNGRCEQFCK NSADNKVVCS CTEGYRLAEN
121: QKSCEPAVPF PCGRVSVSQT SKLTRAETVF PDVDYVNSTE AETILDNITQ STQSFNDFTR
181: VVGGEDAKPG QFPWQVVLNG KVDAFCGGSI VNEKWIVTAA HCVETGVKIT VVAGEHNIEE
241: TEHTEQKRNV IRIIPHHNYN AAINKYNHDI ALLELDEPLV LNSYVTPICI ADKEYTNIFL
301: KFGSGYVSGW GRVFHKGRSA LVLQYLRVPL VDRATCLLST KFTIYNNMFC AGFHEGGRDS
361: CQGDSGGPHV TEVEGTSFLT GIISWGEECA MKGKYGIYTK VSRYVNWIKE KTKLT
SEQ ID NO: 3 (FIX Signal Polypeptide and Propeptide)
    1: MQRVNMIMAE SPGLITICLL GYLLSAECTV FLDHENANKI LNRPKR
```

[0144] The FIX polypeptide is 55 kDa, synthesized as a prepropolypetide chain (SEQ ID NO: 1) composed of three regions: a signal peptide of 28 amino acids (amino acids 1 to 28 of SEQ ID NO: 3), a propeptide of 18 amino acids (amino acids 29 to 46), which is required for gamma-carboxylation of glutamic acid residues, and a mature Factor IX of 415 amino acids (SEQ ID NO: 1 or 2). The propeptide is an 18-amino acid residue sequence N-terminal to the gamma-carboxyglutamate domain. The propeptide binds vitamin K-dependent gamma carboxylase and then is cleaved from the precursor polypeptide of FIX by an endogenous protease, most likely PACE (paired basic amino acid cleaving enzyme), also known as furin or PCSK3. Without the gamma carboxylation, the Gla domain is unable to bind calcium to assume the correct conformation necessary to anchor the protein to negatively charged phospholipid surfaces, thereby rendering Factor IX nonfunctional. Even if it is carboxylated, the Gla domain also depends on cleavage of the propeptide for proper function, since retained propeptide interferes with conformational changes of the Gla domain necessary for optimal binding to calcium and phospholipid. In humans, the resulting mature Factor IX is secreted by liver cells into the blood stream as an inactive zymogen, a single chain protein of 415 amino acid residues that contains approximately 17% carbohydrate by weight (Schmidt, A. E., et al. (2003) Trends Cardiovasc Med, 13: 39).

[0145] The mature FIX is composed of several domains that in an N- to C-terminus configuration are: a GLA domain, an EGF1 domain, an EGF2 domain, an activation peptide (AP) domain, and a protease (or catalytic) domain. A short linker connects the EGF2 domain with the AP domain. FIX contains two activation peptides formed by R145-A146 and R180-V181, respectively. Following activation, the single-chain FIX becomes a 2-chain molecule, in which the two chains are linked by a disulfide bond. Clotting factors can be engineered by replacing their activation peptides resulting in altered activation specificity. In mammals, mature FIX must be activated by activated Factor XI to yield Factor IXa. The protease domain provides, upon activation of FIX to FIXa, the catalytic activity of FIX. Activated Factor VIII (FVIIIa) is the specific cofactor for the full expression of FIXa activity.

[0146] In other embodiments, a FIX polypeptide comprises an Thr148 allelic form of plasma derived Factor IX and has structural and functional characteristics similar to endogenous Factor IX.

[0147] A great many functional FIX variants are known. International publication number WO 02/040544 A3 discloses mutants that exhibit increased resistance to inhibition by heparin at page 4, lines 9-30 and page 15, lines 6-31. International publication number WO 03/020764 A2 discloses FIX mutants with reduced T cell immunogenicity in Tables 2 and 3 (on pages 14-24), and at page 12, lines 1-27. International publication number WO 2007/149406 A2 discloses functional mutant FIX molecules that exhibit increased protein stability, increased in vivo and in vitro half-life, and increased resistance to proteases at page 4, line 1 to page 19, line 11. WO 2007/149406 A2 also discloses chimeric and other variant FIX molecules at page 19, line 12 to page 20, line 9. International publication number WO 08/118507 A2 discloses FIX mutants that exhibit increased clotting activity at page 5, line 14 to page 6, line 5. International publication number WO 09/051717 A2 discloses FIX mutants having an increased number of N-linked and/or O-linked glycosylation sites, which results in an increased half-life and/or recovery at page 9, line 11 to page 20, line 2. International publication number WO 09/137254 A2 also discloses Factor IX mutants with increased numbers of glycosylation sites at page 2, paragraph [006] to page 5, paragraph [011] and page 16, paragraph [044] to page 24, paragraph [057]. International publication number WO 09/130198 A2 discloses functional mutant FIX molecules that have an increased number of glycosylation sites, which result in an increased half-life, at page 4, line 26 to page 12, line 6. International publication number WO 09/140015 A2 discloses functional FIX mutants that an increased number of Cys residues, which can be used for polymer (e.g., PEG) conjugation, at page 11, paragraph [0043] to page 13, paragraph [0053]. The FIX polypeptides described in International Application No. PCT/US2011/043569 filed Jul. 11, 2011 and published as WO 2012/006624 on Jan. 12, 2012 are also incorporated herein by reference in its entirety.

[0148] In addition, hundreds of non-functional mutations in FIX have been identified in hemophilia subjects, many of which are disclosed in Table 5, at pages 11-14 of International publication number WO 09/137254 A2. Such non-functional mutations are not included in the disclosure, but provide additional guidance for which mutations are more or less likely to result in a functional FIX polypeptide.

[0149] In one embodiment, the FIX polypeptide (or Factor IX portion of a fusion polypeptide) comprises an amino acid sequence at least 70%, at least 80%, at least 85%, at least 90%, at least 95%, at least 96%, at least 97%, at least 98%, at least 99%, or 100% identical to the sequence set forth in SEQ ID NO: 1 or 2 (amino acids 1 to 415 of SEQ ID NO: 1 or 2), or alternatively, with a propeptide sequence, or with a propeptide and signal sequence (full length FIX). In another embodiment, the FIX polypeptide comprises an amino acid sequence at least 70%, at least 80%, at least 85%, at least 90%, at least 95%, at least 96%, at least 97%, at least 98%, at least 99%, or 100% identical to the sequence set forth in SEQ ID NO: 2.

[0150] Factor IX coagulant activity is expressed as International Unit(s) (IU). One IU of FIX activity corresponds approximately to the quantity of FIX in one milliliter of normal human plasma. Several assays are available for measuring Factor IX activity, including the one stage clotting assay (activated partial thromboplastin time; aPTT), thrombin generation time (TGA) and rotational thromboelastometry (ROTEM®). The disclosure contemplates sequences that have homology to FIX sequences, sequence fragments that are natural, such as from humans, non-human primates, mammals (including domestic animals), and non-natural sequence variants which retain at least a portion of the biologic activity or biological function of FIX and/or that are useful for preventing, treating, mediating, or ameliorating a coagulation factor-related disease, deficiency, disorder or condition (e.g., bleeding episodes related to trauma, surgery, of deficiency of a coagulation factor). Sequences with homology to human FIX can be found by standard homology searching techniques, such as NCBI BLAST.

[0151] II.B. Heterologous Moieties

[0152] An FIX fusion protein of the disclosure can comprise at least one heterologous moiety inserted into one or more sites within the FIX polypeptide, fused to the C-terminus, or both, wherein the FIX fusion protein has procoagulant activity and can be expressed in vivo or in vitro in a host cell. A “heterologous moiety” can comprise a heterologous polypeptide, or a non-polypeptide moiety, or both. In certain aspects, the heterologous moiety is an XTEN. In some aspects, a FIX fusion protein of the disclosure comprises at least one XTEN inserted into one or more sites within the FIX polypeptide. In some aspects, a FIX fusion protein of the disclosure comprises at least one Fc region fused to the C-terminus of the FIX polypeptide. In other aspects, a FIX fusion protein comprises at least one heterologous moiety inserted into one or more sites within the FIX polypeptide, wherein the heterologous moiety is a half-life extending moiety (e.g., an in vivo half-life extending moiety).

[0153] It is believed that the discovery of the insertions sites wherein the FIX retains at least some of its procoagulant activity would also permit the insertion of other peptides and polypeptides with either unstructured or structured characteristics that are associated with the prolongation of half-life when fused to a FIX protein in one or more of those same sites. Non-limiting examples of heterologous moieties (e.g., a half-life extending moiety) include albumin, albumin fragments, Fc fragments of immunoglobulins, FcRn binding partners, the C-terminal peptide (CTP) of the 13 subunit of human chorionic gonadotropin, a HAP sequence, a transferrin, the PAS polypeptides of U.S. Pat Application No. 20100292130, polyglycine linkers, polyserine linkers, peptides and short polypeptides of 6-40 amino acids of two types of amino acids selected from glycine (G), alanine (A), serine (S), threonine (T), glutamate (E) and proline (P) with varying degrees of secondary structure from less than 50% to greater than 50%, amongst others, would be suitable for insertion in the identified active insertions sites of FIX.

[0154] In certain aspects a heterologous moiety increases the in vivo or in vitro half-life of the FIX fusion protein. In other aspects a heterologous moiety facilitates visualization or localization of the FIX fusion protein. Visualization and/or location of the FIX fusion protein can be in vivo, in vitro, ex vivo, or combinations thereof. In other aspects a heterologous moiety increases stability of the FIX fusion protein. As used herein, the term “stability” refers to an art-recognized measure of the maintenance of one or more physical properties of the FIX fusion protein in response to an environmental condition (e.g., an elevated or lowered temperature). In certain aspects, the physical property is the maintenance of the covalent structure of the FIX fusion protein (e.g., the absence of proteolytic cleavage, unwanted oxidation or deamidation). In other aspects, the physical property can also be the presence of the FIX fusion protein in a properly folded state (e.g., the absence of soluble or insoluble aggregates or precipitates). In one aspect, the stability of the FIX fusion protein is measured by assaying a biophysical property of the FIX fusion protein, for example thermal stability, pH unfolding profile, stable removal of glycans, solubility, biochemical function (e.g., ability to bind to another protein), etc., and/or combinations thereof. In another aspect, biochemical function is demonstrated by the binding affinity of the interaction. In one aspect, a measure of protein stability is thermal stability, i.e., resistance to thermal challenge. Stability can be measured using methods known in the art, such as, HPLC (high performance liquid chromatography), SEC (size exclusion chromatography), DLS (dynamic light scattering), etc. Methods to measure thermal stability include, but are not limited to differential scanning calorimetry (DSC), differential scanning fluorometry (DSF), circular dichroism (CD), and thermal challenge assay.

[0155] In a specific aspect, a heterologous moiety inserted in one or more insertion cites in a FIX fusion protein retains the biochemical activity of the FIX fusion protein. In certain embodiments, the heterologous moiety is an XTEN. In one embodiment, the biochemical activity is FIX activity, which can be measured by chromogenic assay.

[0156] In some embodiments, at least one heterologous moiety is inserted indirectly in an insertion site via linkers located at the N-terminus, the C-terminus, or both the N-terminus and C-terminus of the heterologous moiety. The linkers at the N-terminus and C-terminus of the heterologous moiety can be the same or different. In some embodiments, several linkers can flank one or both termini of the heterologous moiety in tandem. In some embodiments, the linker is “Gly-Ser peptide linker.” The term “Gly-Ser peptide linker” refers to a peptide that comprises glycine and serine residues.

[0157] An exemplary Gly/Ser peptide linker includes, but is not limited to, the amino acid sequence (Gly₄Ser)ₙ (SEQ ID NO:161), wherein n is an integer that is the same or higher than 1, 2, 3, 4, 5, 6, 7, 8, 9, 10, 15, 20, 25, 30, 35, 40, 46, 50, 55, 60, 70, 80, 90, or 100. In one embodiment, n=1, i.e., the linker is (Gly₄Ser) (SEQ ID NO: 161). In one embodiment, n=2, i.e., the linker is (Gly₄Ser)₂ (SEQ ID NO: 162). In another embodiment, n=3, i.e., the linker is (Gly₄Ser)₃ (SEQ ID NO: 172). In another embodiment, n=4, i.e., the linker is (Gly₄Ser)₄ (SEQ ID NO: 173). In another embodiment, n=5, i.e., the linker is (Gly₄Ser)₅ (SEQ ID NO: 174). In yet another embodiment, n=6, i.e., the linker is (Gly₄Ser)₆ (SEQ ID NO: 175). In another embodiment, n=7, i.e., the linker is (Gly₄Ser)₇ (SEQ ID NO: 176). In yet another embodiment, n=8, i.e., the linker is (Gly₄Ser)₈ (SEQ ID NO: 177). In another embodiment, n=9, i.e., the linker is (Gly₄Ser)₉ (SEQ ID NO: 178). In yet another embodiment, n=10, i.e., the linker is (Gly₄Ser)₁₀ (SEQ ID NO: 179).

[0158] Another exemplary Gly/Ser peptide linker comprises the amino acid sequence Ser(Gly₄Ser)ₙ (SEQ ID NO: 180), wherein n is an integer that is the same or higher than 1, 2, 3, 4, 5, 6, 7, 8, 9, 10, 15, 20, 25, 30, 35, 40, 46, 50, 55, 60, 70, 80, 90, or 100. In one embodiment, n=1, i.e., the linker is Ser(Gly₄Ser) (SEQ ID NO: 180). In one embodiment, n=2, i.e., the linker is Ser(Gly₄Ser)₂ (SEQ ID NO: 181). In another embodiment, n=3, i.e., the linker is Ser(Gly₄Ser)₃ (SEQ ID NO: 182). In another embodiment, n=4, i.e., the linker is Ser(Gly₄Ser)₄ (SEQ ID NO: 183). In another embodiment, n=5, i.e., the linker is Ser(Gly₄Ser)₅ (SEQ ID NO: 184). In yet another embodiment, n=6, i.e., the linker is Ser(Gly₄Ser)₆ (SEQ ID NO: 185). In yet another embodiment, n=7, i.e., the linker is Ser(Gly₄Ser)₇ (SEQ ID NO: 186). In yet another embodiment, n=8, i.e., the linker is Ser(Gly₄Ser)₈ (SEQ ID NO: 187). In yet another embodiment, n=9, i.e., the linker is Ser(Gly₄Ser)₉ (SEQ ID NO: 188). In yet another embodiment, n=10, i.e., the linker is Ser(Gly₄Ser)₁₀ (SEQ ID NO: 189).

[0159] In certain aspects, a FIX fusion protein comprises one heterologous moiety inserted at an insertion site listed in TABLE 7. In other aspects, a FIX fusion protein comprises two heterologous moieties inserted in two insertion sites listed in TABLE 7. In a particular embodiment, the two heterologous moieties are inserted in two insertion sites listed in TABLE 8. In certain aspects, a FIX fusion protein comprises three heterologous moieties inserted in three insertion sites listed in TABLE 7. In certain aspects, a FIX fusion protein comprises four heterologous moieties inserted in four insertion sites listed in TABLE 7. In certain aspects, a FIX fusion protein comprises five heterologous moieties inserted in five insertion sites listed in TABLE 7. In certain aspects, a FIX fusion protein comprises six heterologous moieties inserted in six insertion sites listed in TABLE 7. In some aspects, all the inserted heterologous moieties are identical. In other aspects, at least one of the inserted heterologous moieties is different from the rest of inserted heterologous moieties.

[0160] Fusion of the FIX polypeptide to the at least one heterologous moiety, e.g., XTEN, can affect the physical or chemical properties, e.g., pharmacokinetics, of the fusion protein of the present disclosure. In a specific embodiment, the heterologous moiety linked to a FIX protein increases at least one pharmacokinetic property, e.g., increased terminal half-life or increased area under the curve (AUC), so that the fusion protein described herein stays in vivo for an increased period of time compared to wild type FIX or a corresponding FIX lacking the heterologous moiety. In further embodiments, the XTEN sequence used in this disclosure increases at least one pharmacokinetic property, e.g., increased terminal half-life, increased recovery and/or increased bioavailability for subcutaneous dosing, increased area under the curve (AUC), so that FIX protein stays in vivo for an increased period of time compared to wild type FIX or a corresponding FIX lacking the heterologous moiety.

[0161] In certain aspects, a heterologous moiety which increases half-life of the FIX fusion protein of the disclosure comprises, without limitation, a heterologous polypeptide such as albumin, an immunoglobulin Fc region, an XTEN sequence, the C-terminal peptide (CTP) of the β subunit of human chorionic gonadotropin, a PAS sequence, a HAP sequence, a transferrin, albumin-binding moieties, or any fragments, derivatives, variants, or combinations of these polypeptides. In certain aspects the FIX fusion protein of the disclosure comprises a heterologous polypeptide which increases half-life, wherein the heterologous polypeptide is an XTEN sequence. In other related aspects a heterologous moiety can include an attachment site for a non-polypeptide moiety such as polyethylene glycol (PEG), hydroxyethyl starch (HES), polysialic acid, or any derivatives, variants, or combinations of these moieties.

[0162] In other embodiments, a FIX fusion protein of the disclosure is conjugated to one or more polymers. The polymer can be water-soluble or non-water-soluble. The polymer can be covalently or non-covalently attached to FIX or to other moieties conjugated to FIX. Non-limiting examples of the polymer can be poly(alkylene oxide), poly(vinyl pyrrolidone), poly(vinyl alcohol), polyoxazoline, or poly(acryloylmorpholine).

[0163] In certain aspects, a FIX fusion protein of the disclosure comprises one, two, three or more heterologous moieties, which can each be the same or different molecules. In some embodiments, the FIX fusion protein comprises one or more XTENs. In other embodiments, the FIX fusion protein comprises one or more XTENs and one or more Fc domains. In one particular embodiment, the FIX fusion protein can comprise an XTEN inserted within the FIX and an Fc fused to the C-terminus of the FIX.

[0164] The FIX fusion proteins of the present disclosure can have an increased in vivo half-life as compared to native FIX, rFIXFc, or FIX R338L. In some embodiments, the FIX fusion protein can have at least about 1.5 fold, at least about 2-fold, at least about 3-fold, or at least about 4-fold greater in vivo half-life as compared to native FIX lacking the heterologous moiety or as compared to FIX R338L lacking the heterologous moiety. In one particular embodiment, the FIX fusion protein has an in vivo half-life more than 2-fold greater than the FIX polypeptide without the heterologous moiety.

[0165] In other embodiments, the FIX fusion protein can have an in vivo half-life that is at least about 5 hours, at least about 6 hours, at least about 7 hours, at east about 8 hours, at least about 9 hours, at least about 10 hours, at east about 11 hours, at least about 12 hours, at least about 13 hours, at east about 14 hours, at least about 15 hours, at least about 16 hours, at east about 17 hours, at least about 18 hours, at least about 19 hours, at east about 20 hours, at least about 21 hours, at least about 22 hours, at east about 23 hours, at least about 24 hours, at least about 25 hours, at east about 26 hours, at least about 27 hours, at least about 28 hours, at east about 29 hours, at least about 30 hours, at least about 31 hours, at east about 32 hours, at least about 33 hours, or at least about 34 hours longer than the in vivo half-life of a FIX polypeptide lacking a heterologous moiety.

[0166] II.B.1. XTENs

[0167] In some embodiments, the at least one heterologous moiety is an XTEN. As used here “XTEN sequence” refers to extended length polypeptides with non-naturally occurring, substantially non-repetitive sequences that are composed mainly of small hydrophilic amino acids, with the sequence having a low degree or no secondary or tertiary structure under physiologic conditions. As a fusion protein partner, XTENs can serve as a carrier, conferring certain desirable pharmacokinetic, physicochemical and pharmaceutical properties when linked to a FIX sequence of the disclosure to create a fusion protein. Such desirable properties include but are not limited to enhanced pharmacokinetic parameters and solubility characteristics. As used herein, “XTEN” specifically excludes antibodies or antibody fragments such as single-chain antibodies or Fc fragments of a light chain or a heavy chain.

[0168] In certain aspects, a FIX fusion protein of the disclosure comprises at least one XTEN or fragment, variant, or derivative thereof inserted into the FIX, wherein the FIX fusion protein has procoagulant activity and can be expressed in vivo or in vitro in a host cell. In certain aspects, two of the heterologous moieties are XTEN sequences. In some aspects, three of the heterologous moieties are XTEN sequences. In some aspects, four of the heterologous moieties are XTEN sequences. In some aspects, five of the heterologous moieties are XTEN sequences. In some aspects, six or more of the heterologous moieties are XTEN sequences.

[0169] In some embodiments, the XTEN sequence useful for the disclosure is a peptide or a polypeptide having greater than about 20, 30, 40, 50, 60, 70, 80, 90, 100, 150, 200, 250, 300, 350, 400, 450, 500, 550, 600, 650, 700, 750, 800, 850, 900, 950, 1000, 1200, 1400, 1600, 1800, or 2000 amino acid residues. In certain embodiments, XTEN is a peptide or a polypeptide having greater than about 20 to about 3000 amino acid residues, greater than 30 to about 2500 residues, greater than 40 to about 2000 residues, greater than 50 to about 1500 residues, greater than 60 to about 1000 residues, greater than 70 to about 900 residues, greater than 80 to about 800 residues, greater than 90 to about 700 residues, greater than 100 to about 600 residues, greater than 110 to about 500 residues, or greater than 120 to about 400 residues. In one particular embodiment, the XTEN comprises an amino acid sequence of longer than 42 amino acids and shorter than 144 amino acids in length.

[0170] The XTEN sequence of the disclosure can comprise one or more sequence motif of 5 to 14 (e.g., 9 to 14) amino acid residues or an amino acid sequence at least 80%, 90%, 91%, 92%, 93%, 94%, 95%, 96%, 97%, 98%, or 99% identical to the sequence motif, wherein the motif comprises, consists essentially of, or consists of 4 to 6 types of amino acids (e.g., 5 amino acids) selected from the group consisting of glycine (G), alanine (A), serine (S), threonine (T), glutamate (E) and proline (P). See US 2010-0239554 A1.

[0171] In some embodiments, the XTEN comprises non-overlapping sequence motifs in which about 80%, or at least about 85%, or at least about 90%, or about 91%, or about 92%, or about 93%, or about 94%, or about 95%, or about 96%, or about 97%, or about 98%, or about 99% or about 100% of the sequence consists of multiple units of non-overlapping sequences selected from a single motif family selected from Table 2A, resulting in a family sequence. As used herein, “family” means that the XTEN has motifs selected only from a single motif category from Table 2A; i.e., AD, AE, AF, AG, AM, AQ, BC, or BD XTEN, and that any other amino acids in the XTEN not from a family motif are selected to achieve a needed property, such as to permit incorporation of a restriction site by the encoding nucleotides, incorporation of a cleavage sequence, or to achieve a better linkage to FIX. In some embodiments of XTEN families, an XTEN sequence comprises multiple units of non-overlapping sequence motifs of the AD motif family, or of the AE motif family, or of the AF motif family, or of the AG motif family, or of the AM motif family, or of the AQ motif family, or of the BC family, or of the BD family, with the resulting XTEN exhibiting the range of homology described above. In other embodiments, the XTEN comprises multiple units of motif sequences from two or more of the motif families of Table 2A. These sequences can be selected to achieve desired physical/chemical characteristics, including such properties as net charge, hydrophilicity, lack of secondary structure, or lack of repetitiveness that are conferred by the amino acid composition of the motifs, described more fully below. In the embodiments hereinabove described in this paragraph, the motifs incorporated into the XTEN can be selected and assembled using the methods described herein to achieve an XTEN of about 36 to about 3000 amino acid residues.

TABLE 2A
XTEN Sequence Motifs of 12 Amino
Acids and Motif Families

| Motif Family* | MOTIF SEQUENCE | SEQ ID NO: |
|---|---|---|
| AD | GESPGGSSGSES | 4 |
| AD | GSEGSSGPGESS | 5 |
| AD | GSSESGSSEGGP | 6 |
| AD | GSGGEPSESGSS | 7 |
| AE, AM | GSPAGSPTSTEE | 8 |
| AE, AM, AQ | GSEPATSGSETP | 9 |
| AE, AM, AQ | GTSESATPESGP | 10 |
| AE, AM, AQ | GTSTEPSEGSAP | 11 |
| AF, AM | GSTSESPSGTAP | 12 |
| AF, AM | GTSTPESGSASP | 13 |
| AF, AM | GTSPSGESSTAP | 14 |
| AF, AM | GSTSSTAESPGP | 15 |
| AG, AM | GTPGSGTASSSP | 16 |
| AG, AM | GSSTPSGATGSP | 17 |
| AG, AM | GSSPSASTGTGP | 18 |
| AG, AM | GASPGTSSTGSP | 19 |
| AQ | GEPAGSPTSTSE | 20 |
| AQ | GTGEPSSTPASE | 21 |
| AQ | GSGPSTESAPTE | 22 |
| AQ | GSETPSGPSETA | 23 |
| AQ | GPSETSTSEPGA | 24 |
| AQ | GSPSEPTEGTSA | 25 |
| BC | GSGASEPTSTEP | 26 |
| BC | GSEPATSGTEPS | 27 |
| BC | GTSEPSTSEPGA | 28 |
| BC | GTSTEPSEPGSA | 29 |
| BD | GSTAGSETSTEA | 30 |
| BD | GSETATSGSETA | 31 |
| BD | GTSESATSESGA | 32 |
| BD | GTSTEASEGSAS | 33 |

*Denotes individual motif sequences that, when used
together in various permutations, results in a “family
sequence”

[0172] XTEN can have varying lengths for insertion into or linkage to FIX. In one embodiment, the length of the XTEN sequence(s) is chosen based on the property or function to be achieved in the fusion protein. Depending on the intended property or function, XTEN can be short or intermediate length sequence or longer sequence that can serve as carriers. In certain embodiments, the XTEN includes short segments of about 6 to about 99 amino acid residues, intermediate lengths of about 100 to about 399 amino acid residues, and longer lengths of about 400 to about 1000 and up to about 3000 amino acid residues. Thus, the XTEN inserted into or linked to FIX can have lengths of about 6, about 12, about 36, about 40, about 42, about 72, about 96, about 144, about 288, about 400, about 500, about 576, about 600, about 700, about 800, about 864, about 900, about 1000, about 1500, about 2000, about 2500, or up to about 3000 amino acid residues in length. In other embodiments, the XTEN sequences is about 6 to about 50, about 50 to about 100, about 100 to 150, about 150 to 250, about 250 to 400, about 400 to about 500, about 500 to about 900, about 900 to 1500, about 1500 to 2000, or about 2000 to about 3000 amino acid residues in length. The precise length of an XTEN inserted into or linked to FIX can vary without adversely affecting the activity of the FIX. In one embodiment, one or more of the XTENs used herein have 42 amino acids, 72 amino acids, 144 amino acids, 288 amino acids, 576 amino acids, or 864 amino acids in length and can be selected from one or more of the XTEN family sequences; i.e., AD, AE, AF, AG, AM, AQ, BC or BD.

[0173] In some embodiments, the XTEN sequence used in the disclosure is at least 60%, 70%, 80%, 85%, 90%, 91%, 92%, 93%, 94%, 95%, 96%, 97%, 98%, 99%, or 100% identical to a sequence selected from the group consisting of AE42, AG42, AE48, AM48, AE72, AG72, AE108, AG108, AE144, AF144, AG144, AE180, AG180, AE216, AG216, AE252, AG252, AE288, AG288, AE324, AG324, AE360, AG360, AE396, AG396, AE432, AG432, AE468, AG468, AE504, AG504, AF504, AE540, AG540, AF540, AD576, AE576, AF576, AG576, AE612, AG612, AE624, AE648, AG648, AG684, AE720, AG720, AE756, AG756, AE792, AG792, AE828, AG828, AD836, AE864, AF864, AG864, AM875, AE912, AM923, AM1318, BC864, BD864, AE948, AE1044, AE1140, AE1236, AE1332, AE1428, AE1524, AE1620, AE1716, AE1812, AE1908, AE2004A, AG948, AG1044, AG1140, AG1236, AG1332, AG1428, AG1524, AG1620, AG1716, AG1812, AG1908, AG2004, and any combination thereof. See US 2010-0239554 A1. In one particular embodiment, the XTEN comprises AE42, AE72, AE144, AE288, AE576, AE864, AG 42, AG72, AG144, AG288, AG576, AG864, or any combination thereof.

[0174] In one embodiment, the XTEN sequence is at least 60%, 70%, 80%, 90%, 95%, 96%, 97%, 98%, 99% or 100% identical to an amino acid sequence selected from the group consisting of AE36 (SEQ ID NO: 217), AE42 (SEQ ID NO: 34), AE72 (SEQ ID NO: 35), AE78 (SEQ ID NO: 218), AE144 (SEQ ID NO: 36), AE144_2A (SEQ ID NO: 37), AE144_3B (SEQ ID NO: 38), AE144_4A (SEQ ID NO: 39), AE144_5A (SEQ ID NO: 40), AE144_6B (SEQ ID NO: 41), AG144 (SEQ ID NO: 42), AG144_A (SEQ ID NO: 43), AG144_B (SEQ ID NO: 44), AG144_C (SEQ ID NO: 45), AG144_F (SEQ ID NO: 46), AE288 (SEQ ID NO: 47), AE288_2 (SEQ ID NO: 48), AG288 (SEQ ID NO: 49), AE576 (SEQ ID NO: 50), AG576 (SEQ ID NO: 51), AE864 (SEQ ID NO: 52), AG864 (SEQ ID NO: 53), XTEN_AE72_2A_1 (SEQ ID NO:202), XTEN_AE72_2A_2 (SEQ ID NO:203), XTEN_AE72_3B_1 (SEQ ID NO:204), XTEN_AE72_3B_2 (SEQ ID NO:205), XTEN_AE72_4A_2 (SEQ ID NO: 206), XTEN_AE72_5A_2 (SEQ ID NO:207), XTEN_AE72_6B_1 (SEQ ID NO: 208), XTEN_AE72_6B_2 (SEQ ID NO:209), XTEN_AE72_1A_1 (SEQ ID NO: 210), XTEN_AE72_1A_2 (SEQ ID NO:211), XTEN_AE72_1A_3 (SEQ ID NO: 230), XTEN_AE144_1A (SEQ ID NO:212), AE150 (SEQ ID NO:213), AG150 (SEQ ID NO:214), AE294 (SEQ ID NO:215), AG294 (SEQ ID NO:216), and any combination thereof.

[0175] In some embodiments, less than 100% of amino acids of an XTEN are selected from glycine (G), alanine (A), serine (S), threonine (T), glutamate (E) and proline (P), or less than 100% of the sequence consists of the sequence motifs from Table 2A or the XTEN sequences of Table 2B. In such embodiments, the remaining amino acid residues of the XTEN are selected from any of the other 14 natural L-amino acids, but can be preferentially selected from hydrophilic amino acids such that the XTEN sequence contains at least about 90%, 91%, 92%, 93%, 94%, 95%, 96%, 97%, 98%, or at least about 99% hydrophilic amino acids. The content of hydrophobic amino acids in the XTEN utilized in the conjugation constructs can be less than 5%, or less than 2%, or less than 1% hydrophobic amino acid content. Hydrophobic residues that are less favored in construction of XTEN include tryptophan, phenylalanine, tyrosine, leucine, isoleucine, valine, and methionine. Additionally, XTEN sequences can contain less than 5% or less than 4% or less than 3% or less than 2% or less than 1% or none of the following amino acids: methionine (for example, to avoid oxidation), or asparagine and glutamine (to avoid desamidation).

[0176] In another embodiment, the XTEN sequence is selected from the group consisting of AE36 (SEQ ID NO: 217), AE42 (SEQ ID NO: 34), AE72 (SEQ ID NO: 35), AE78 (SEQ ID NO: 218), AE144 (SEQ ID NO: 36), AE144_2A (SEQ ID NO: 37), AE144_3 B (SEQ ID NO: 38), AE144_4A (SEQ ID NO: 39), AE144_5A (SEQ ID NO: 40), AE144_6B (SEQ ID NO: 41), AG144 (SEQ ID NO: 42), AG144_A (SEQ ID NO: 43), AG144_B (SEQ ID NO: 44), AG144_C (SEQ ID NO: 45), AG144_F (SEQ ID NO: 46), AE288 (SEQ ID NO: 47), AE288_2 (SEQ ID NO: 48), AG288 (SEQ ID NO: 49), AE576 (SEQ ID NO: 50), AG576 (SEQ ID NO: 51), AE864 (SEQ ID NO: 52), AG864 (SEQ ID NO: 53), XTEN_AE72_2A_1 (SEQ ID NO:202), XTEN_AE72_2A_2 (SEQ ID NO:203), XTEN_AE72_3B_1 (SEQ ID NO:204), XTEN_AE72_3B_2 (SEQ ID NO:205), XTEN_AE72_4A_2 (SEQ ID NO:206), XTEN_AE72_5A_2 (SEQ ID NO:207), XTEN_AE72_6B_1 (SEQ ID NO: 208), XTEN_AE72_6B_2 (SEQ ID NO: 209), XTEN_AE72_1A_1 (SEQ ID NO: 210), XTEN_AE72_1A_2 (SEQ ID NO: 211), XTEN_AE72_1A_3 (SEQ ID NO: 230), XTEN_AE144_1A (SEQ ID NO: 212), AE150 (SEQ ID NO: 213), AG150 (SEQ ID NO: 214), AE294 (SEQ ID NO: 215), AG294 (SEQ ID NO:216), and any combinations thereof. In a specific embodiment, the XTEN sequence is selected from the group consisting of AE72, AE144, and AE288. The amino acid sequences for certain XTEN sequences of the disclosure are shown in Table 2B.

TABLE 2B
XTEN Sequences

| XTEN | Amino Acid Sequence |
|---|---|
| AE36 | GSPAGSPTSTEEGTSESATPESGPGSEPATSGSETP |
| SEQ ID NO: 217 | |
| AE42 | GAPGSPAGSPTSTEEGTSESATPESGPGSEPATSGSETPASS |
| SEQ ID NO: 34 | |
| AE72 | GAPTSESATPESGPGSEPATSGSETPGTSESATPESGPGSEPATSGSETPGTSE |
| SEQ ID NO: 35 | SATPESGPGTSTEPSEGSAPGASS |
| AE78 | GAPTSESATPESGPGSEPATSGSETPGTSESATPESGPGSEPATSGSETPGTSE |
| SEQ ID NO: 218 | SATPESGPGTSTEPSEGSAPGASS |
| AE144 | GSEPATSGSETPGTSESATPESGPGSEPATSGSETPGSPAGSPTSTEEGTSTEP |
| SEQ ID NO: 36 | SEGSAPGSEPATSGSETPGSEPATSGSETPGSEPATSGSETPGTSTEPSEGSAP |
| | GTSESAPESGPGSEPATSGSETPGTSTEPSEGSAP |
| AE144_2A | TSTEPSEGSAPGSPAGSPTSTEEGTSTEPSEGSAPGTSTEPSEGSAPGTSESAT |
| SEQ ID NO: 37 | PESGPGTSTEPSEGSAPGTSESATPESGPGSEPATSGSETPGTSTEPSEGSAPG |
| | TSTEPSEGSAPGTSESATPESGPGTSESATPESGPG |
| AE144_3B | SPAGSPTSTEEGTSESATPESGPGSEPATSGSETPGTSESATPESGPGTSTEPS |
| SEQ ID NO: 38 | EGSAPGTSTEPSEGSAPGTSTEPSEGSAPGTSTEPSEGSAPGTSTEPSEGSAPG |
| | TSTEPSEGSAPGSPAGSPTSTEEGTSTEPSEGSAPG |
| AE144_4A | TSESATPESGPGSEPATSGSETPGTSESATPESGPGSEPATSGSETPGTSESAT |
| SEQ ID NO: 39 | PESGPGTSTEPSEGSAPGTSESATPESGPGSPAGSPTSTEEGSPAGSPTSTEEG |
| | SPAGSPTSTEEGTSESATPESGPGTSTEPSEGSAPG |
| AE144_5A | TSESATPESGPGSEPATSGSETPGTSESATPESGPGSEPATSGSETPGTSESAT |
| SEQ ID NO: 40 | PESGPGTSTEPSEGSAPGSPAGSPTSTEEGTSESATPESGPGSEPATSGSETPG |
| | TSESATPESGPGSPAGSPTSTEEGSPAGSPTSTEEG |
| AE144_6B | TSTEPSEGSAPGTSESATPESGPGTSESATPESGPGTSESATPESGPGSEPATS |
| SEQ ID NO: 41 | GSETPGSEPATSGSETPGSPAGSPTSTEEGTSTEPSEGSAPGTSTEPSEGSAPG |
| | SEPATSGSETPGTSESATPESGPGTSTEPSEGSAPG |
| AG144 | GTPGSGTASSSPGSSTPSGATGSPGSSPSASTGTGPGSSPSASTGTGPGASPGT |
| SEQ ID NO: 42 | SSTGSPGASPGTSSTGSPGSSTPSGATGSPGSSPSASTGTGPGASPGTSSTGSP |
| | GSSPSASTGTGPGTPGSGTASSSPGSSTPSGATGSP |
| AG144_A | GASPGTSSTGSPGSSPSASTGTGPGSSPSASTGTGPGTPGSGTASSSPGSSTPS |
| SEQ ID NO: 43 | GATGSPGSSPSASTGTGPGASPGTSSTGSPGTPGSGTASSSPGSSTPSGATGSP |
| | GTPGSGTASSSPGASPGTSSTGSPGASPGTSSTGSP |
| AG144_B | GTPGSGTASSSPGSSTPSGATGSPGASPGTSSTGSPGTPGSGTASSSPGSSTPS |
| SEQ ID NO: 44 | GATGSPGSSPSASTGTGPGSSPSASTGTGPGSSTPSGATGSPGSSTPSGATGSP |
| | GASPGTSSTGSPGASPGTSSTGSPGASPGTSSTGSP |
| AG144_C | GTPGSGTASSSPGASPGTSSTGSPGASPGTSSTGSPGASPGTSSTGSPGSSPSA |
| SEQ ID NO: 45 | STGTGPGTPGSGTASSSPGASPGTSSTGSPGASPGTSSTGSPGASPGTSSTGSP |
| | GSSTPSGATGSPGSSTPSGATGSPGASPGTSSTGSP |
| AG144_F | GSSPSASTGTGPGSSPSASTGTGPGASPGTSSTGSPGASPGTSSTGSPGSSTPS |
| SEQ ID NO: 46 | GATGSPGSSPSASTGTGPGASPGTSSTGSPGSSPSASTGTGPGTPGSGTASSSP |
| | GSSTPSGATGSPGSSTPSGATGSPGASPGTSSTGSP |
| AE288 | GTSESATPESGPGSEPATSGSETPGTSESATPESGPGSEPATSGSETPGTSESA |
| SEQ ID NO: 47 | TPESGPGTSTEPSEGSAPGSPAGSPTSTEEGTSESATPESGPGSEPATSGSETP |
| | GTSESATPESGPGSPAGSPTSTEEGSPAGSPTSTEEGTSTEPSEGSAPGTSESA |
| | TPESGPGTSESATPESGPGTSESATPESGPGSEPATSGSETPGSEPATSGSETP |
| | GSPAGSPTSTEEGTSTEPSEGSAPGTSTEPSEGSAPGSEPATSGSETPGTSESA |
| | TPESGPGTSTEPSEGSAP |
| AE288_2 | GSPAGSPTSTEEGTSESATPESGPGSEPATSGSETPGTSESATPESGPGTSTEP |
| SEQ ID NO: 48 | SEGSAPGTSTEPSEGSAPGTSTEPSEGSAPGTSTEPSEGSAPGTSTEPSEGSAP |
| | GTSTEPSEGSAPGSPAGSPTSTEEGTSTEPSEGSAPGTSESATPESGPGSEPAT |
| | SGSETPGTSESATPESGPGSEPATSGSETPGTSESATPESGPGTSTEPSEGSAP |
| | GTSESATPESGPGSPAGSPTSTEEGSPAGSPTSTEEGSPAGSPTSTEEGTSESA |
| | TPESGPGTSTEPSEGSAP |
| AG288 | PGASPGTSSTGSPGASPGTSSTGSPGTPGSGTASSSPGSSTPSGATGSPGTPGS |
| SEQ ID NO: 49 | GTASSSPGSSTPSGATGSPGTPGSGTASSSPGSSTPSGATGSPGSSTPSGATGS |
| | PGSSPSASTGTGPGSSPSASTGTGPGASPGTSSTGSPGTPGSGTASSSPGSSTP |
| | SGATGSPGSSPSASTGTGPGSSPSASTGTGPGASPGTSSTGSPGASPGTSSTGS |
| | PGSSTPSGATGSPGSSPSASTGTGPGASPGTSSTGSPGSSPSASTGTGPGTPGS |
| | GTASSSPGSSTPSGATGS |
| AE576 | GSPAGSPTSTEEGTSESATPESGPGTSTEPSEGSAPGSPAGSPTSTEEGTSTEP |
| SEQ ID NO: 50 | SEGSAPGTSTEPSEGSAPGTSESATPESGPGSEPATSGSETPGSEPATSGSETP |
| | GSPAGSPTSTEEGTSESATPESGPGTSTEPSEGSAPGTSTEPSEGSAPGSPAGS |
| | PTSTEEGTSTEPSEGSAPGTSTEPSEGSAPGTSESATPESGPGTSTEPSEGSAP |
| | GTSESATPESGPGSEPATSGSETPGTSTEPSEGSAPGTSTEPSEGSAPGTSESA |
| | TPESGPGTSESATPESGPGSPAGSPTSTEEGTSESATPESGPGSEPATSGSETP |
| | GTSESATPESGPGTSTEPSEGSAPGTSTEPSEGSAPGTSTEPSEGSAPGTSTEP |
| | SEGSAPGTSTEPSEGSAPGTSTEPSEGSAPGSPAGSPTSTEEGTSTEPSEGSAP |
| | GTSESATPESGPGSEPATSGSETPGTSESATPESGPGSEPATSGSETPGTSESA |
| | TPESGPGTSTEPSEGSAPGTSESATPESGPGSPAGSPTSTEEGSPAGSPTSTEE |
| | GSPAGSPTSTEEGTSESATPESGPGTSTEPSEGSAP |
| AG576 | PGTPGSGTASSSPGSSTPSGATGSPGSSPSASTGTGPGSSPSASTGTGPGSSTP |
| SEQ ID NO: 51 | SGATGSPGSSTPSGATGSPGASPGTSSTGSPGASPGTSSTGSPGASPGTSSTGS |
| | PGTPGSGTASSSPGASPGTSSTGSPGASPGTSSTGSPGASPGTSSTGSPGSSPS |
| | ASTGTGPGTPGSGTASSSPGASPGTSSTGSPGASPGTSSTGSPGASPGTSSTGS |
| | PGSSTPSGATGSPGSSTPSGATGSPGASPGTSSTGSPGTPGSGTASSSPGSSTP |
| | SGATGSPGSSTPSGATGSPGSSTPSGATGSPGSSPSASTGTGPGASPGTSSTGS |
| | PGASPGTSSTGSPGTPGSGTASSSPGASPGTSSTGSPGASPGTSSTGSPGASPG |
| | TSSTGSPGASPGTSSTGSPGTPGSGTASSSPGSSTPSGATGSPGTPGSGTASSS |
| | PGSSTPSGATGSPGTPGSGTASSSPGSSTPSGATGSPGSSTPSGATGSPGSSPS |
| | ASTGTGPGSSPSASTGTGPGASPGTSSTGSPGTPGSGTASSSPGSSTPSGATGS |
| | PGSSPSASTGTGPGSSPSASTGTGPGASPGTSSTGS |
| AE864 | GSPAGSPTSTEEGTSESATPESGPGTSTEPSEGSAPGSPAGSPTSTEEGTSTEP |
| SEQ ID NO: 52 | SEGSAPGTSTEPSEGSAPGTSESATPESGPGSEPATSGSETPGSEPATSGSETP |
| | GSPAGSPTSTEEGTSESATPESGPGTSTEPSEGSAPGTSTEPSEGSAPGSPAGS |
| | PTSTEEGTSTEPSEGSAPGTSTEPSEGSAPGTSESATPESGPGTSTEPSEGSAP |
| | GTSESATPESGPGSEPATSGSETPGTSTEPSEGSAPGTSTEPSEGSAPGTSESA |
| | TPESGPGTSESATPESGPGSPAGSPTSTEEGTSESATPESGPGSEPATSGSETP |
| | GTSESATPESGPGTSTEPSEGSAPGTSTEPSEGSAPGTSTEPSEGSAPGTSTEP |
| | SEGSAPGTSTEPSEGSAPGTSTEPSEGSAPGSPAGSPTSTEEGTSTEPSEGSAP |
| | GTSESATPESGPGSEPATSGSETPGTSESATPESGPGSEPATSGSETPGTSESA |
| | TPESGPGTSTEPSEGSAPGTSESATPESGPGSPAGSPTSTEEGSPAGSPTSTEE |
| | GSPAGSPTSTEEGTSESATPESGPGTSTEPSEGSAPGTSESATPESGPGSEPAT |
| | SGSETPGTSESATPESGPGSEPATSGSETPGTSESATPESGPGTSTEPSEGSAP |
| | GSPAGSPTSTEEGTSESATPESGPGSEPATSGSETPGTSESATPESGPGSPAGS |
| | PTSTEEGSPAGSPTSTEEGTSTEPSEGSAPGTSESATPESGPGTSESATPESGP |
| | GTSESATPESGPGSEPATSGSETPGSEPATSGSETPGSPAGSPTSTEEGTSTEP |
| | SEGSAPGTSTEPSEGSAPGSEPATSGSETPGTSESATPESGPGTSTEPSEGSAP |
| AG864 | GASPGTSSTGSPGSSPSASTGTGPGSSPSASTGTGPGTPGSGTASSSPGSSTPS |
| SEQ ID NO: 53 | GATGSPGSSPSASTGTGPGASPGTSSTGSPGTPGSGTASSSPGSSTPSGATGSP |
| | GTPGSGTASSSPGASPGTSSTGSPGASPGTSSTGSPGTPGSGTASSSPGSSTPS |
| | GATGSPGASPGTSSTGSPGTPGSGTASSSPGSSTPSGATGSPGSSPSASTGTGP |
| | GSSPSASTGTGPGSSTPSGATGSPGSSTPSGATGSPGASPGTSSTGSPGASPGT |
| | SSTGSPGASPGTSSTGSPGTPGSGTASSSPGASPGTSSTGSPGASPGTSSTGSP |
| | GASPGTSSTGSPGSSPSASTGTGPGTPGSGTASSSPGASPGTSSTGSPGASPGT |
| | SSTGSPGASPGTSSTGSPGSSTPSGATGSPGSSTPSGATGSPGASPGTSSTGSP |
| | GTPGSGTASSSPGSSTPSGATGSPGSSTPSGATGSPGSSTPSGATGSPGSSPSA |
| | STGTGPGASPGTSSTGSPGASPGTSSTGSPGTPGSGTASSSPGASPGTSSTGSP |
| | GASPGTSSTGSPGASPGTSSTGSPGASPGTSSTGSPGTPGSGTASSSPGSSTPS |
| | GATGSPGTPGSGTASSSPGSSTPSGATGSPGTPGSGTASSSPGSSTPSGATGSP |
| | GSSTPSGATGSPGSSPSASTGTGPGSSPSASTGTGPGASPGTSSTGSPGTPGSG |
| | TASSSPGSSTPSGATGSPGSSPSASTGTGPGSSPSASTGTGPGASPGTSSTGSP |
| | GASPGTSSTGSPGSSTPSGATGSPGSSPSASTGTGPGASPGTSSTGSPGSSPSA |
| | STGTGPGTPGSGTASSSPGSSTPSGATGSPGSSTPSGATGSPGASPGTSSTGSP |
| XTEN_AE72_2A_1 | TSTEPSEGSAPGSPAGSPTSTEEGTSTEPSEGSAPGTSTEPSEGSAPGTSESAT |
| SEQ ID NO: 202 | PESGPGTSTEPSEGSAPG |
| XTEN_AE72_2A_2 | TSESATPESGPGSEPATSGSETPGTSTEPSEGSAPGTSTEPSEGSAPGTSESAT |
| SEQ ID NO: 203 | PESGPGTSESATPESGPG |
| XTEN_AE72_3B_1 | SPAGSPTSTEEGTSESATPESGPGSEPATSGSETPGTSESATPESGPGTSTEPS |
| SEQ ID NO: 204 | EGSAPGTSTEPSEGSAPG |
| XTEN_AE72_3B_2 | TSTEPSEGSAPGTSTEPSEGSAPGTSTEPSEGSAPGTSTEPSEGSAPGSPAGSP |
| SEQ ID NO: 205 | TSTEEGTSTEPSEGSAPG |
| XTEN_AE72_4A_2 | TSESATPESGPGSPAGSPTSTEEGSPAGSPTSTEEGSPAGSPTSTEEGTSESAT |
| SEQ ID NO: 206 | PESGPGTSTEPSEGSAPG |
| XTEN_AE72_5A_2 | SPAGSPTSTEEGTSESATPESGPGSEPATSGSETPGTSESATPESGPGSPAGSP |
| SEQ ID NO: 207 | TSTEEGSPAGSPTSTEEG |
| XTEN_AE72_6B_1 | TSTEPSEGSAPGTSESATPESGPGTSESATPESGPGTSESATPESGPGSEPATS |
| (SEQ ID NO: 208) | GSETPGSEPATSGSETPG |
| XTEN_AE72_6B_2 | SPAGSPTSTEEGTSTEPSEGSAPGTSTEPSEGSAPGSEPATSGSETPGTSESAT |
| SEQ ID NO: 209 | PESGPGTSTEPSEGSAPG |
| XTEN_AE72_1A_1 | SPAGSPTSTEEGTSESATPESGPGTSTEPSEGSAPGSPAGSPTSTEEGTSTEPS |
| SEQ ID NO: 210 | EGSAPGTSTEPSEGSAPG |
| XTEN_AE72_1A_2 | TSESATPESGPGSEPATSGSETPGSEPATSGSETPGSPAGSPTSTEEGTSESAT |
| SEQ ID NO: 211 | PESGPGTSTEPSEGSAPG |
| XTEN_AE72_1A_3 | PSPGSPTSTEEGTSESATPESGPGSEPATSGSETPGTSESATPESGPGTSTEPS |
| SEQ ID NO: 230 | EGSAPGTSTEPSEGSAPG |
| XTEN_AE144_1A | SPAGSPTSTEEGTSESATPESGPGTSTEPSEGSAPGSPAGSPTSTEEGTSTEPS |
| SEQ ID NO: 212 | EGSAPGTSTEPSEGSAPGTSESATPESGPGSEPATSGSETPGSEPATSGSETPG |
| | SPAGSPTSTEEGTSESATPESGPGTSTEPSEGSAPG |
| AE150 | GAPGSEPATSGSETPGTSESATPESGPGSEPATSGSETPGSPAGSPTSTEEGTS |
| SEQ ID NO: 213 | TEPSEGSAPGSEPATSGSETPGSEPATSGSETPGSEPATSGSETPGTSTEPSEG |
| | SAPGTSESATPESGPGSEPATSGSETPGTSTEPSEGSAPASS |
| G150 | GAPGTPGSGTASSSPGSSTPSGATGSPGSSPSASTGTGPGSSPSASTGTGPGAS |
| SEQ ID NO: 214 | PGTSSTGSPGASPGTSSTGSPGSSTPSGATGSPGSSPSASTGTGPGASPGTSST |
| | GSPGSSPSASTGTGPGTPGSGTASSSPGSSTPSGATGSPASS |
| AE294 | GAPGTSESATPESGPGSEPATSGSETPGTSESATPESGPGSEPATSGSETPGTS |
| SEQ ID NO: 215 | ESATPESGPGTSTEPSEGSAPGSPAGSPTSTEEGTSESATPESGPGSEPATSGS |
| | ETPGTSESATPESGPGSPAGSPTSTEEGSPAGSPTSTEEGTSTEPSEGSAPGTS |
| | ESATPESGPGTSESATPESGPGTSESATPESGPGSEPATSGSETPGSEPATSGS |
| | ETPGSPAGSPTSTEEGTSTEPSEGSAPGTSTEPSEGSAPGSEPATSGSETPGTS |
| | ESATPESGPGTSTEPSEGSAPASS |
| AG294 | GAPPGASPGTSSTGSPGASPGTSSTGSPGTPGSGTASSSPGSSTPSGATGSPGT |
| SEQ ID NO: 216 | PGSGTASSSPGSSTPSGATGSPGTPGSGTASSSPGSSTPSGATGSPGSSTPSGA |
| | TGSPGSSPSASTGTGPGSSPSASTGTGPGASPGTSSTGSPGTPGSGTASSSPGS |
| | STPSGATGSPGSSPSASTGTGPGSSPSASTGTGPGASPGTSSTGSPGASPGTSS |
| | TGSPGSSTPSGATGSPGSSPSASTGTGPGASPGTSSTGSPGSSPSASTGTGPGT |
| | PGSGTASSSPGSSTPSGATGSASS |

[0177] In further embodiments, the XTEN sequence used in the disclosure affects the physical or chemical property, e.g., pharmacokinetics, of the fusion protein of the present disclosure. The XTEN sequence used in the present disclosure can exhibit one or more of the following advantageous properties: conformational flexibility, enhanced aqueous solubility, high degree of protease resistance, low immunogenicity, low binding to mammalian receptors, or increased hydrodynamic (or Stokes) radii. In a specific embodiment, the XTEN sequence linked to a FIX protein in this disclosure increases pharmacokinetic properties such as longer terminal half-life, increased bioavailability or increased area under the curve (AUC), so that the protein described herein stays in vivo for an increased period of time compared to wild type FIX. In further embodiments, the XTEN sequence used in this disclosure increases pharmacokinetic properties such as longer terminal half-life or increased area under the curve (AUC), so that FIX protein stays in vivo for an increased period of time compared to wild type FIX.

[0178] In some embodiments, the FIX protein exhibits an in vivo half-life at least about 1.5 fold, at least about 2-fold, at least about 3-fold, or at least about 4-fold greater than native FIX, rFIXFc, FIX R338L, or a corresponding FIX protein lacking the XTEN. In one particular embodiment, the FIX fusion protein can have an in vivo half-life more than 2-fold greater than a FIX polypeptide without the heterologous moiety.

[0179] In other embodiments, the FIX fusion protein exhibits an in vivo half-life which is at least about 5 hours, at least about 6 hours, at least about 7 hours, at least about 8 hours, at least about 9 hours, at least about 10 hours, at least about 11 hours, at least about 12 hours, at least about 13 hours, at least about 14 hours, at least about 15 hours, at least about 16 hours, at least about 17 hours, at least about 18 hours, at least about 19 hours, at least about 20 hours, at least about 21 hours, at least about 22 hours, at least about 23 hours, at least about 24 hours, at least about 25 hours, at least about 26 hours, at least about 27 hours, at least about 28 hours, at least about 29 hours, at least about 30 hours, at least about 31 hours, at east about 32 hours, at least about 33 hours, or at least about 34 hours longer than the in vivo half-life of a FIX polypeptide lacking the heterologous moiety.

[0180] A variety of methods and assays can be employed to determine the physical/chemical properties of proteins comprising the XTEN sequence. Such methods include, but are not limited to analytical centrifugation, EPR, HPLC-ion exchange, HPLC-size exclusion, HPLC-reverse phase, light scattering, capillary electrophoresis, circular dichroism, differential scanning calorimetry, fluorescence, HPLC-ion exchange, HPLC-size exclusion, IR, NMR, Raman spectroscopy, refractometry, and UV/Visible spectroscopy. Additional methods are disclosed in Amau et al., Prot Expr and Purif 48, 1-13 (2006).

[0181] Additional examples of XTEN sequences that can be used according to the present disclosure and are disclosed in US Patent Publication Nos. 2010/0239554 A1, 2010/0323956 A1, 2011/0046060 A1, 2011/0046061 A1, 2011/0077199 A1, or 2011/0172146 A1, or International Patent Publication Nos. WO 2010091122 A1, WO 2010144502 A2, WO 2010144508 A1, WO 2011028228 A1, WO 2011028229 A1, WO 2011028344 A2, WO 2014/011819 A2, or WO 2015/023891.

[0182] In some aspects, a FIX fusion protein comprises one or more XTEN sequences inserted within FIX, fused to the C-terminus of FIX, or both. In one embodiment, the one or more XTEN sequences are inserted within the GLA domain. In another embodiment, the one or more XTEN sequences are inserted within EGF1 domain. In other embodiments, the one or more XTEN sequences are inserted within EGF2. In still other embodiments, the one or more XTEN sequences are inserted within AP. In yet other embodiments, the one or more XTEN sequences are inserted within the catalytic domain. In some embodiments, the one or more XTEN sequences are fused to the C-terminus of the FIX.

[0183] In certain aspects, a FIX fusion protein comprises one XTEN sequence inserted at an insertion site listed in Table 7. In other aspects, a FIX fusion protein comprises two XTEN sequences inserted in two insertion sites listed in Table 7. In a particular embodiment, the two XTEN sequences are inserted in two insertion sites listed in Table 8. In certain aspects, a FIX fusion protein comprises three XTEN sequences inserted in three insertion sites listed in Table 7. In certain aspects, a FIX fusion protein comprises four XTEN sequences inserted in four insertion sites listed in Table 7. In certain aspects, a FIX fusion protein comprises five XTEN sequences inserted in five insertion sites listed in Table 7. In certain aspects, a FIX fusion protein comprises six XTEN sequences inserted in six insertion sites listed in Table 7. In some aspects, all the inserted XTEN sequences are identical. In other aspects, at least one of the inserted XTEN sequences is different from the rest of inserted XTEN sequences.

[0184] In some aspects, a FIX fusion protein comprises one XTEN sequence inserted within the FIX polypeptide at an insertion site corresponding to an amino acid selected from the group consisting of amino acid 103 of SEQ ID NO: 2, amino acid 105 of SEQ ID NO: 2, amino acid 142 of SEQ ID NO: 2, amino acid 149 of SEQ ID NO: 2, amino acid 162 of SEQ ID NO: 2, amino acid 166 of SEQ ID NO: 2, amino acid 174 of SEQ ID NO: 2, amino acid 224 of SEQ ID NO: 2, amino acid 226 of SEQ ID NO: 2, amino acid 228 of SEQ ID NO: 2, amino acid 413 of SEQ ID NO: 2, and any combination thereof, wherein the FIX fusion protein exhibits procoagulant activity. In some aspects, a FIX fusion protein comprises a second XTEN sequence within the FIX polypeptide at an insertion site corresponding to an amino acid selected from the group consisting of amino acid 103 of SEQ ID NO: 2, amino acid 105 of SEQ ID NO: 2, amino acid 142 of SEQ ID NO: 2, amino acid 149 of SEQ ID NO: 2, amino acid 162 of SEQ ID NO: 2, amino acid 166 of SEQ ID NO: 2, amino acid 174 of SEQ ID NO: 2, amino acid 224 of SEQ ID NO: 2, amino acid 226 of SEQ ID NO: 2, amino acid 228 of SEQ ID NO: 2, amino acid 413 of SEQ ID NO: 2, and any combination thereof or wherein the second XTEN is fused to the C-terminus of the FIX polypeptide, wherein the FIX fusion protein exhibits procoagulant activity. In one particular aspect, a FIX fusion protein comprises one XTEN sequence fused to the C-terminus of the FIX, wherein the XTEN comprises an amino acid sequence of longer than 42 amino acids and shorter than 144 amino acids in length.

[0185] II.B.2 Fc regions or FcRn binding partners

[0186] In some embodiments, the at least one heterologous moiety is an Fc region (e.g., an FcRn binding partner) or a fragment thereof. In certain aspects, a FIX fusion protein of the disclosure comprises at least one Fc region (e.g., an FcRn binding partner) inserted within the FIX, fused to the C-terminus of the FIX, or both, wherein the FIX fusion protein has procoagulant activity and can be expressed in vivo or in vitro in a host cell. In some embodiments, the FIX fusion protein comprises an Fc region fused to the C-terminus of the FIX polypeptide. In certain embodiments, the FIX fusion protein (e.g., FIX-Fc fusion protein) does not comprise an XTEN sequence. “Fc” or “Fc region” as used herein, can be a functional neonatal Fc receptor (FcRn) binding partner comprising an Fc domain, variant, or fragment thereof, unless otherwise specified. An FcRn binding partner is any molecule that can be specifically bound by the FcRn receptor with consequent active transport by the FcRn receptor of the FcRn binding partner, including, but not limited to, albumin. Thus, the term Fc includes any variants of IgG Fc that are functional. The region of the Fc portion of IgG that binds to the FcRn receptor has been described based on X-ray crystallography (Burmeister et al., Nature 372:379 (1994), incorporated herein by reference in its entirety). The major contact area of the Fc with the FcRn is near the junction of the CH2 and CH3 domains. Fc-FcRn contacts are all within a single Ig heavy chain. FcRn binding partners include, but are not limited to, whole IgG, the Fc fragment of IgG, and other fragments of IgG that include the complete binding region of FcRn. An Fc can comprise the CH2 and CH3 domains of an immunoglobulin with or without the hinge region of the immunoglobulin. Also included are Fc fragments, variants, or derivatives which maintain the desirable properties of an Fc region in a fusion protein, e.g., an increase in half-life, e.g., in vivo half-life. Myriad mutants, fragments, variants, and derivatives are described, e.g., in PCT Publication Nos. WO 2011/069164 A2, WO 2012/006623 A2, WO 2012/006635 A2, or WO 2012/006633 A2, all of which are incorporated herein by reference in their entireties.

[0187] The one or more Fc domains can be inserted within the FIX polypeptide, fused to the C-terminus of the polypeptide, or both. In some embodiments, the Fc domain is fused to the FIX polypeptide. In certain embodiments, the FIX polypeptide comprises a FIXFc fusion protein having an amino acid sequence at least about 70%, at least about 75%, at least about 80%, at least about 85%, at least about 90%, at least about 95%, at least about 96%, at least about 97%, at least about 98%, at least about 99%, or 100% identical to the amino acid sequence of SEQ ID NO: 229. In some embodiments, the Fc domain is fused to another heterologous moiety, such as an XTEN, which is inserted within the FIX or fused to the C-terminus of the XTEN. In some embodiments, the FIX fusion protein comprises a second Fc domain. The second Fc domain can be associated with the first Fc domain, e.g., through one or more covalent bonds.

[0188] II.B.3 Albumins

[0189] In some embodiments, the at least one heterologous moiety is an albumin, an albumin binding domain, or an albumin binding small molecule, or a variant, derivative, or fragment thereof. In certain aspects, a FIX fusion protein of the disclosure comprises at least one albumin polypeptide or fragment, variant, or derivative thereof inserted the FIX, fused to the C-terminus of the FIX, or both, wherein the FIX fusion protein has procoagulant activity and can be expressed in vivo or in vitro in a host cell. Human serum albumin (HSA, or HA), a protein of 609 amino acids in its full-length form, is responsible for a significant proportion of the osmotic pressure of serum and also functions as a carrier of endogenous and exogenous ligands. The term “albumin” as used herein includes full-length albumin or a functional fragment, variant, derivative, or analog thereof. Examples of albumin or the fragments or variants thereof are disclosed in US Pat. Publ. Nos. 2008/0194481A1, 2008/0004206 A1, 2008/0161243 A1, 2008/0261877 A1, or 2008/0153751 A1 or PCT Appl. Publ. Nos. 2008/033413 A2, 2009/058322 A1, or 2007/021494 A2, which are incorporated herein by reference in their entireties.

[0190] The albumin-binding polypeptides (ABPs) can compromise, without limitation, bacterial albumin-binding domains, albumin-binding peptides, or albumin-binding antibody fragments that can bind to albumin. Domain 3 from streptococcal protein G, as disclosed by Kraulis et al., FEBS Lett. 378:190-194 (1996) and Linhult et al., Protein Sci. 11:206-213 (2002) is an example of a bacterial albumin-binding domain. Examples of albumin-binding peptides include a series of peptides having the core sequence DICLPRWGCLW (SEQ ID NO: 163). See, e.g., Dennis et al., J. Biol. Chem. 2002, 277: 35035-35043 (2002). Examples of albumin-binding antibody fragments are disclosed in Muller and Kontermann, Curr. Opin. Mol. Ther. 9:319-326 (2007); Roovers et al., Cancer Immunol. Immunother. 56:303-317 (2007), and Holt et al., Prot. Eng. Design Sci., 21:283-288 (2008), which are incorporated herein by reference in their entireties.

[0191] In certain aspects, a FIX fusion protein of the disclosure comprises at least one attachment site for a non-polypeptide small molecule, variant, or derivative thereof that can bind to albumin (e.g., an albumin binding small molecule) inserted into the FIX, fused to the C-terminus of the FIX, or both, wherein the FIX fusion protein has procoagulant activity and can be expressed in vivo or in vitro in a host cell. For example, a FIX fusion protein of the disclosure can include one or more organic albumin-binding moieties attached in one or more insertion sites within the FIX, or fused to the C-terminus of the FIX, or both, wherein the FIX fusion protein has procoagulant activity and can be expressed in vivo or in vitro in a host cell. An example of such albumin-binding moieties is 2-(3-maleimidopropanamido)-6-(4-(4-iodophenyl)butanamido)hexanoate (“Albu” tag) as disclosed by Trussel et al., Bioconjugate Chem. 20:2286-2292 (2009).

[0192] In some embodiments, the albumin-binding polypeptide sequence is flanked at the C-terminus, the N-terminus, or both termini, by a Gly-Ser peptide linker sequence. In some embodiments, the Gly-Ser peptide linker is Gly₄Ser (SEQ ID NO: 161). In other embodiments, the Gly-Ser peptide linker is (Gly₄Ser)₂ (SEQ ID NO: 162).

[0193] II.B.4. CTP

[0194] In some embodiments, the at least one heterologous moiety is a C-terminal peptide (CTP) of the 13 subunit of human chorionic gonadotropin or fragment, variant, or derivative thereof. In certain aspects, a FIX fusion protein of the disclosure comprises at least one CTP or fragment, variant, or derivative thereof inserted into the FIX, fused to the C-terminus of the FIX, or both, wherein the FIX fusion protein has procoagulant activity and can be expressed in vivo or in vitro in a host cell. One or more CTP peptides inserted into a recombinant protein is known to increase the half-life of that protein. See, e.g., U.S. Pat. No. 5,712,122, incorporated by reference herein in its entirety. Exemplary CTP peptides include DPRFQDSSSSKAPPPSLPSPSRLPGPSDTPIL (SEQ ID NO: 164) or SSSSKAPPPSLPSPSRLPGPSDTPILPQ (SEQ ID NO: 165). See, e.g., U.S. Patent Application Publication No. US 2009/0087411 A1, incorporated by reference. In some embodiments, the CTP sequence is flanked at the C-terminus, the N-terminus, or both termini, by a Gly-Ser peptide linker sequence. In some embodiments, the Gly-Ser peptide linker is Gly₄Ser (SEQ ID NO: 161). In other embodiments, the Gly-Ser peptide linker is (Gly₄Ser)₂ (SEQ ID NO: 162).

[0195] II.B.5 PAS

[0196] In some embodiments, the at least one heterologous moiety is a PAS peptide. In certain aspects, a FIX fusion protein of the disclosure comprises at least one PAS peptide or fragment, variant, or derivative thereof inserted into the FIX, fused to the C-terminus of the FIX, or both, wherein the FIX fusion protein has procoagulant activity and can be expressed in vivo or in vitro in a host cell. A “PAS peptide” or “PAS sequence,” as used herein, means an amino acid sequence comprising mainly alanine and serine residues or comprising mainly alanine, serine, and proline residues, the amino acid sequence forming random coil conformation under physiological conditions. Accordingly, the PAS sequence is a building block, an amino acid polymer, or a sequence cassette comprising, consisting essentially of, or consisting of alanine, serine, and proline which can be used as a part of the heterologous moiety in the fusion protein. An amino acid polymer also can form random coil conformation when residues other than alanine, serine, and proline are added as a minor constituent in the PAS sequence. By “minor constituent” is meant that that amino acids other than alanine, serine, and proline can be added in the PAS sequence to a certain degree, e.g., up to about 12%, i.e., about 12 of 100 amino acids of the PAS sequence, up to about 10%, up to about 9%, up to about 8%, about 6%, about 5%, about 4%, about 3%, i.e. about 2%, or about 1%, of the amino acids. The amino acids different from alanine, serine and proline can be selected from the group consisting of Arg, Asn, Asp, Cys, Gln, Glu, Gly, His, Ile, Leu, Lys, Met, Phe, Thr, Trp, Tyr, and Val. Under physiological conditions, a PAS peptide forms a random coil conformation and thereby can mediate an increased in vivo and/or in vitro stability to a recombinant protein of the disclosure, and has procoagulant activity.

[0197] Non-limiting examples of the PAS peptides include ASPAAPAPASPAAPAPSAPA (SEQ ID NO: 154), AAPASPAPAAPSAPAPAAPS (SEQ ID NO: 155), APSSPSPSAPSSPSPASPSS (SEQ ID NO: 156), APSSPSPSAPSSPSPASPS (SEQ ID NO: 157), SSPSAPSPSSPASPSPSSPA (SEQ ID NO: 158), AASPAAPSAPPAAASPAAPSAPPA (SEQ ID NO: 159), ASAAAPAAASAAASAPSAAA (SEQ ID NO: 160) or any variants, derivatives, fragments, or combinations thereof. Additional examples of PAS sequences are known from, e.g., US Pat. Publ. No. 2010/0292130 A1 and PCT Appl. Publ. No. WO 2008/155134 A1. European issued patent EP2173890.

[0198] In some embodiments, the PAS sequence is flanked at the C-terminus, the N-terminus, or both termini, by a Gly-Ser peptide linker sequence. In some embodiments, the Gly-Ser peptide linker is Gly₄Ser (SEQ ID NO: 161). In other embodiments, the Gly/Ser peptide linker is (Gly₄Ser)₂ (SEQ ID NO: 162).

[0199] II.B.6. HAP

[0200] In some embodiments, the at least one heterologous moiety is a homo-amino acid polymer (HAP) peptide or fragment, variant, or derivative thereof. In certain aspects, a FIX fusion protein of the disclosure comprises at least one homo-amino acid polymer (HAP) peptide or fragment, variant, or derivative thereof inserted within the FIX, fused to the C-terminus of the FIX, or both, wherein the FIX fusion protein has procoagulant activity and can be expressed in vivo or in vitro in a host cell. A HAP peptide can comprise a repetitive sequence of glycine, which has at least 50 amino acids, at least 100 amino acids, 120 amino acids, 140 amino acids, 160 amino acids, 180 amino acids, 200 amino acids, 250 amino acids, 300 amino acids, 350 amino acids, 400 amino acids, 450 amino acids, or 500 amino acids in length. A HAP sequence is capable of extending half-life of a moiety fused to or linked to the HAP sequence. Non-limiting examples of the HAP sequence include, but are not limited to (Gly)ₙ (SEQ ID NO: 233), (Gly₄Ser)ₙ (SEQ ID NO: 234) or S(Gly₄Ser)ₙ (SEQ ID NO: 235), wherein n is 1, 2, 3, 4, 5, 6, 7, 8, 9, 10, 11, 12, 13, 14, 15, 16, 17, 18, 19, or 20. In one embodiment, n is 20, 21, 22, 23, 24, 25, 26, 26, 28, 29, 30, 31, 32, 33, 34, 35, 36, 37, 38, 39, or 40. In another embodiment, n is 50, 60, 70, 80, 90, 100, 110, 120, 130, 140, 150, 160, 170, 180, 190, or 200. See, e.g., Schlapschy M et al., Protein Eng. Design Selection, 20: 273-284 (2007).

[0201] II.B.7. Organic Polymers

[0202] In some embodiments, the at least one heterologous moiety is an organic polymer, e.g., a polyethylene glycol, a polysialic acid, or hydroxyethyl starch. In certain aspects, a FIX fusion protein of the disclosure comprises at least one attachment site for a non-polypeptide heterologous moiety or fragment, variant, or derivative thereof inserted into the FIX, fused to the C-terminus of the FIX, or both, wherein the FIX fusion protein has procoagulant activity and can be expressed in vivo or in vitro in a host cell. For example, a FIX fusion protein of the disclosure can include one or more polyethylene glycol (PEG) moieties attached within the FIX sequence, attached to the C-terminus of the FIX, or both, wherein the FIX fusion protein has procoagulant activity and can be expressed in vivo or in vitro in a host cell.

[0203] PEGylated FIX can refer to a conjugate formed between FIX and at least one polyethylene glycol (PEG) molecule. PEG is commercially available in a large variety of molecular weights and average molecular weight ranges. Typical examples of PEG average molecular weight ranges include, but are not limited to, about 200, about 300, about 400, about 600, about 1000, about 1300-1600, about 1450, about 2000, about 3000, about 3000-3750, about 3350, about 3000-7000, about 3500-4500, about 5000-7000, about 7000-9000, about 8000, about 10000, about 8500-11500, about 16000-24000, about 35000, about 40000, about 60000, and about 80000 daltons. These average molecular weights are provided merely as examples and are not meant to be limiting in any way.

[0204] A FIX fusion protein of the disclosure can be PEGylated to include mono- or poly-(e.g., 2-4) PEG moieties. PEGylation can be carried out by any of the PEGylation reactions known in the art. Methods for preparing a PEGylated protein product will generally include (i) reacting a polypeptide with polyethylene glycol (such as a reactive ester or aldehyde derivative of PEG) under conditions whereby the peptide of the disclosure becomes attached to one or more PEG groups; and (ii) obtaining the reaction product(s). In general, the optimal reaction conditions for the reactions will be determined case by case based on known parameters and the desired result.

[0205] There are a number of PEG attachment methods available to those skilled in the art, for example Malik F et al., Exp. Hematol. 20:1028-35 (1992); Francis, Focus on Growth Factors 3(2):4-10 (1992); European Pat. Pub. Nos. EP0401384, EP0154316, and EP0401384; and International Pat. Appl. Pub. Nos. WO92/16221 and WO95/34326. As a non-limiting example, FIX variants can contain cysteine substitutions at or near one or more insertion sites as described herein, and the cysteines can be further conjugated to PEG polymer. See Mei et al., Blood 116:270-279 (2010) and U.S. Pat. No. 7,632,921, which are incorporated herein by reference in their entireties.

[0206] In other embodiments, the organic polymer is a polysialic acid (PSA). PSAs are naturally occurring unbranched polymers of sialic acid produced by certain bacterial strains and in mammals in certain cells. See, e.g., Roth J. et al. (1993) in Polysialic Acid: From Microbes to Man, eds. Roth J., Rutishauser U., Troy F. A. (BirkhäuserVerlag, Basel, Switzerland), pp. 335-348. PSAs can be produced in various degrees of polymerization from n=about 80 or more sialic acid residues down to n=2 by limited acid hydrolysis or by digestion with neuraminidases, or by fractionation of the natural, bacterially derived forms of the polymer. There are a number of PSA attachment methods available to those skilled in the art, e.g., the same PEG attachment methods described above. In certain aspects, an activated PSA can also be attached to a cysteine amino acid residue on FIX. See, e.g., U.S. Pat. No. 5,846,951.

[0207] In other embodiments, the organic polymer is a hydroxyethyl starch (HES) polymer. In certain aspects, a FIX fusion protein of the disclosure comprises at least one HES polymer conjugated at one or more cite within the FIX, fused to the C-terminus of the FIX, or both, wherein the FIX fusion protein has procoagulant activity and can be expressed in vivo or in vitro in a host cell.

### III. Polynucleotides, Vectors, Host Cells, and Methods of Making

[0208] The present disclosure further provides a polynucleotide encoding a FIX fusion protein described herein, an expression vector comprising the polynucleotide, a host cell comprising the polynucleotide or the vector, or methods of making the FIX fusion protein.

[0209] The polynucleotide encoding a FIX fusion protein can be a single nucleotide sequence, two nucleotide sequences, three nucleotide sequences, or more. In one embodiment, a single nucleotide sequence encodes a FIX fusion protein comprising a FIX polypeptide and a heterologous moiety (e.g., XTEN), e.g., a FIX fusion protein comprising a FIX polypeptide and an XTEN inserted within the FIX polypeptide, an Fc domain fused to the C terminus of the FIX polypeptide, and a second Fc domain fused to the FIX polypeptide by an optional linker. In another embodiment, the polynucleotide comprises two nucleotide sequences, the first nucleotide sequence encoding a FIX polypeptide and an XTEN inserted within the FIX polypeptide and the second nucleotide sequence encoding a heterologous moiety, e.g., Fc. In other embodiments, the polynucleotide comprises two nucleotide sequences, the first nucleotide sequence encoding a FIX polypeptide, an XTEN inserted within the FIX polypeptide, and an Fc domain fused to the FIX polypeptide, and the second nucleotide sequence encoding a second Fc domain. The encoded Fc domains can form a covalent bond after expression.

[0210] In some embodiments, the polynucleotide encoding the FIX fusion protein is codon-optimized.

[0211] As used herein, an expression vector refers to any nucleic acid construct which contains the necessary elements for the transcription and translation of an inserted coding sequence, or in the case of an RNA viral vector, the necessary elements for replication and translation, when introduced into an appropriate host cell. Expression vectors can include plasmids, phagemids, viruses, and derivatives thereof.

[0212] A gene expression control sequence as used herein is any regulatory nucleotide sequence, such as a promoter sequence or promoter-enhancer combination, which facilitates the efficient transcription and translation of the coding nucleic acid to which it is operably linked. The gene expression control sequence may, for example, be a mammalian or viral promoter, such as a constitutive or inducible promoter. Constitutive mammalian promoters include, but are not limited to, the promoters for the following genes: hypoxanthine phosphoribosyl transferase (HPRT), adenosine deaminase, pyruvate kinase, beta-actin promoter, and other constitutive promoters. Exemplary viral promoters which function constitutively in eukaryotic cells include, for example, promoters from the cytomegalovirus (CMV), simian virus (e.g., SV40), papilloma virus, adenovirus, human immunodeficiency virus (HIV), Rous sarcoma virus, cytomegalovirus, the long terminal repeats (LTR) of Moloney leukemia virus, and other retroviruses, and the thymidine kinase promoter of herpes simplex virus. Other constitutive promoters are known to those of ordinary skill in the art. The promoters useful as gene expression sequences of the disclosure also include inducible promoters. Inducible promoters are expressed in the presence of an inducing agent. For example, the metallothionein promoter is induced to promote transcription and translation in the presence of certain metal ions. Other inducible promoters are known to those of ordinary skill in the art.

[0213] For the purposes of this disclosure, numerous expression vector systems can be employed. These expression vectors are typically replicable in the host organisms either as episomes or as an integral part of the host chromosomal DNA. Expression vectors can include expression control sequences including, but not limited to, promoters (e.g., naturally-associated or heterologous promoters), enhancers, signal sequences, splice signals, enhancer elements, and transcription termination sequences. Preferably, the expression control sequences are eukaryotic promoter systems in vectors capable of transforming or transfecting eukaryotic host cells. Expression vectors can also utilize DNA elements which are derived from animal viruses such as bovine papilloma virus, polyoma virus, adenovirus, vaccinia virus, baculovirus, retroviruses (RSV, MMTV or MOMLV), cytomegalovirus (CMV), or SV40 virus. Others involve the use of polycistronic systems with internal ribosome binding sites.

[0214] Commonly, expression vectors contain selection markers (e.g., ampicillin-resistance, hygromycin-resistance, tetracycline resistance or neomycin resistance) to permit detection of those cells transformed with the desired DNA sequences (see, e.g., Itakura et al., U.S. Pat. No. 4,704,362). Cells which have integrated the DNA into their chromosomes can be selected by introducing one or more markers which allow selection of transfected host cells. The marker can provide for prototrophy to an auxotrophic host, biocide resistance (e.g., antibiotics) or resistance to heavy metals such as copper. The selectable marker gene can either be directly linked to the DNA sequences to be expressed, or introduced into the same cell by cotransformation.

[0215] An example of a vector useful for expressing an optimized FIX sequence is NEOSPLA (U.S. Pat. No. 6,159,730). This vector contains the cytomegalovirus promoter/enhancer, the mouse beta globin major promoter, the SV40 origin of replication, the bovine growth hormone polyadenylation sequence, neomycin phosphotransferase exon 1 and exon 2, the dihydrofolate reductase gene and leader sequence. This vector has been found to result in very high level expression of antibodies upon incorporation of variable and constant region genes, transfection in cells, followed by selection in G418 containing medium and methotrexate amplification. Vector systems are also taught in U.S. Pat. Nos. 5,736,137 and 5,658,570, each of which is incorporated by reference in its entirety herein. This system provides for high expression levels, e.g., >30 pg/cell/day. Other exemplary vector systems are disclosed e.g., in U.S. Pat. No. 6,413,777.

[0216] In other embodiments the polypeptides of the instant disclosure are expressed using polycistronic constructs. In these expression systems, multiple gene products of interest such as multiple polypeptides of multimer binding protein can be produced from a single polycistronic construct. These systems advantageously use an internal ribosome entry site (IRES) to provide relatively high levels of polypeptides in eukaryotic host cells. Compatible IRES sequences are disclosed in U.S. Pat. No. 6,193,980 which is also incorporated herein.

[0217] More generally, once the vector or DNA sequence encoding a polypeptide has been prepared, the expression vector can be introduced into an appropriate host cell. That is, the host cells can be transformed. Introduction of the plasmid into the host cell can be accomplished by various techniques well known to those of skill in the art, as discussed above. The transformed cells are grown under conditions appropriate to the production of the FIX polypeptide, and assayed for FIX polypeptide synthesis. Exemplary assay techniques include enzyme-linked immunosorbent assay (ELISA), radioimmunoassay (RIA), or flourescence-activated cell sorter analysis (FACS), immunohistochemistry, and the like.

[0218] In descriptions of processes for isolation of polypeptides from recombinant hosts, the terms “cell” and “cell culture” are used interchangeably to denote the source of polypeptide unless it is clearly specified otherwise. In other words, recovery of polypeptides from the “cells” can mean either from spun down whole cells, or from the cell culture containing both the medium and the suspended cells.

[0219] The host cell line used for protein expression is preferably of mammalian origin; most preferably of human or mouse origin. Exemplary host cell lines have been described above. In one embodiment of the method to produce a polypeptide with FIX activity, the host cell is a HEK293 cell. In another embodiment of the method to produce a polypeptide with FIX activity, the host cell is a CHO cell.

[0220] Genes encoding the polypeptides of the disclosure can also be expressed in non-mammalian cells such as bacteria or yeast or plant cells. In this regard it will be appreciated that various unicellular non-mammalian microorganisms such as bacteria can also be transformed; i.e., those capable of being grown in cultures or fermentation. Bacteria, which are susceptible to transformation, include members of the enterobacteriaceae, such as strains of Escherichia coli or Salmonella; Bacillaceae, such as Bacillus subtilis; Pneumococcus; Streptococcus, and Haemophilus influenzae. It will further be appreciated that, when expressed in bacteria, the polypeptides typically become part of inclusion bodies. The polypeptides must be isolated, purified and then assembled into functional molecules.

[0221] Alternatively, polynucleotide sequences of the disclosure can be incorporated in transgenes for introduction into the genome of a transgenic animal and subsequent expression in the milk of the transgenic animal (see, e.g., Deboer et al., U.S. Pat. No. 5,741,957, Rosen, U.S. Pat. No. 5,304,489, and Meade et al., U.S. Pat. No. 5,849,992). Suitable transgenes include coding sequences for polypeptides in operable linkage with a promoter and enhancer from a mammary gland specific gene, such as casein or beta lactoglobulin.

[0222] In vitro production allows scale-up to give large amounts of the desired polypeptides. Techniques for mammalian cell cultivation under tissue culture conditions are known in the art and include homogeneous suspension culture, e.g., in an airlift reactor or in a continuous stirrer reactor, or immobilized or entrapped cell culture, e.g., in hollow fibers, microcapsules, on agarose microbeads or ceramic cartridges. If necessary and/or desired, the solutions of polypeptides can be purified by the customary chromatography methods, for example gel filtration, ion-exchange chromatography, chromatography over DEAE-cellulose or (immuno-)affinity chromatography, e.g., after preferential biosynthesis of a synthetic hinge region polypeptide or prior to or subsequent to the HIC chromatography step described herein. An affinity tag sequence (e.g., a His(6) (SEQ ID NO: 236) tag) can optionally be attached or included within the polypeptide sequence to facilitate downstream purification.

[0223] Once expressed, the FIX protein can be purified according to standard procedures of the art, including ammonium sulfate precipitation, affinity column chromatography, HPLC purification, gel electrophoresis and the like (see generally Scopes, Protein Purification (Springer-Verlag, N.Y., (1982)). Substantially pure proteins of at least about 90% to 95% homogeneity are preferred, and 98% to 99% or more homogeneity most preferred, for pharmaceutical uses.

[0224] In one embodiment, the host cell is a eukaryotic cell. As used herein, a eukaryotic cell refers to any animal or plant cell having a definitive nucleus. Eukaryotic cells of animals include cells of vertebrates, e.g., mammals, and cells of invertebrates, e.g., insects. Eukaryotic cells of plants specifically can include, without limitation, yeast cells. A eukaryotic cell is distinct from a prokaryotic cell, e.g., bacteria.

[0225] In certain embodiments, the eukaryotic cell is a mammalian cell. A mammalian cell is any cell derived from a mammal. Mammalian cells specifically include, but are not limited to, mammalian cell lines. In one embodiment, the mammalian cell is a human cell. In another embodiment, the mammalian cell is a HEK 293 cell, which is a human embryonic kidney cell line. HEK 293 cells are available as CRL-1533 from American Type Culture Collection, Manassas, Va., and as 293-H cells, Catalog No. 11631-017 or 293-F cells, Catalog No. 11625-019 from Invitrogen (Carlsbad, Calif.). In some embodiments, the mammalian cell is a PER.C6® cell, which is a human cell line derived from retina. PER.C6® cells are available from Crucell (Leiden, The Netherlands). In other embodiments, the mammalian cell is a Chinese hamster ovary (CHO) cell. CHO cells are available from American Type Culture Collection, Manassas, Va. (e.g., CHO-Kl; CCL-61). In still other embodiments, the mammalian cell is a baby hamster kidney (BHK) cell. BHK cells are available from American Type Culture Collection, Manassas, Va. (e.g., CRL-1632). In some embodiments, the mammalian cell is a HKB11 cell, which is a hybrid cell line of a HEK293 cell and a human B cell line. Mei et al., Mol. Biotechnol. 34(2): 165-78 (2006).

[0226] In still other embodiments, transfected cells are stably transfected. These cells can be selected and maintained as a stable cell line, using conventional techniques known to those of skill in the art.

[0227] Host cells containing DNA constructs of the protein are grown in an appropriate growth medium. As used herein, the term “appropriate growth medium” means a medium containing nutrients required for the growth of cells. Nutrients required for cell growth may include a carbon source, a nitrogen source, essential amino acids, vitamins, minerals, and growth factors. Optionally, the media can contain one or more selection factors. Optionally the media can contain bovine calf serum or fetal calf serum (FCS). In one embodiment, the media contains substantially no IgG. The growth medium will generally select for cells containing the DNA construct by, for example, drug selection or deficiency in an essential nutrient which is complemented by the selectable marker on the DNA construct or co-transfected with the DNA construct. Cultured mammalian cells are generally grown in commercially available serum-containing or serum-free media (e.g., MEM, DMEM, DMEM/F12). In one embodiment, the medium is CD293 (Invitrogen, Carlsbad, Calif.). In another embodiment, the medium is CD17 (Invitrogen, Carlsbad, Calif.). Selection of a medium appropriate for the particular cell line used is within the level of those ordinary skilled in the art.

[0228] In some embodiments, the nucleic acid, vector, or host cell further comprises an additional nucleotide which encodes a protein convertase. The protein convertase can be selected from the group consisting of proprotein convertase subtilisin/kexin type 5 (PCSK5 or PC5), proprotein convertase subtilisin/kexin type 7 (PCSK7 or PC5), a yeast Kex 2, proprotein convertase subtilisin/kexin type 3 (PACE or PCSK3), and two or more combinations thereof. In some embodiments, the protein convertase is PACE, PC5, or PC7. In a specific embodiment, the protein convertase is PC5 or PC7. See International Appl. Publ. No. WO 2012/006623, which is incorporated herein by reference. In another embodiment, the protein convertase is PACE/Furin.

[0229] In certain aspects, the present disclosure relates to the FIX fusion protein produced by the methods described herein.

[0230] In certain aspects, host cells of the disclosure can express the FIX fusion protein in vivo or in vitro. In vitro production allows scale-up to give large amounts of the desired altered polypeptides of the disclosure. a FIX fusion protein can be produced by culturing the host cells described herein under conditions in which the FIX fusion protein is expressed. Techniques for mammalian cell cultivation under tissue culture conditions are known in the art and include homogeneous suspension culture, e.g. in an airlift reactor or in a continuous stirrer reactor, or immobilized or entrapped cell culture, e.g. in hollow fibers, microcapsules, on agarose microbeads or ceramic cartridges. If necessary and/or desired, the solutions of polypeptides can be purified by the customary chromatography methods, for example gel filtration, ion-exchange chromatography, hydrophobic interaction chromatography (HIC, chromatography over DEAE-cellulose or affinity chromatography. In other aspects, the host cells express the FIX fusion protein in vivo.

[0231] In one embodiment, the disclosure includes a method of making a FIX fusion protein comprising inserting a heterologous moiety in an insertion site, fusing a heterologous moiety to the C-terminus of the FIX, or both as described herein, wherein the FIX fusion protein exhibits procoagulant activity.

[0232] In another embodiment, the disclosure includes a method of increasing half-life of a FIX protein without eliminating or reducing procoagulant activity of the FIX protein, comprising inserting a heterologous moiety in an insertion site, fusing a heterologous moiety to the C-terminus of the FIX, or both as described herein, wherein the FIX fusion protein exhibits procoagulant activity and increased half-life compared to the FIX protein without the heterologous moiety.

[0233] In other embodiments, the disclosure provides a method of constructing a FIX fusion protein comprising designing a nucleotide sequence encoding the FIX fusion protein comprising at least one heterologous moiety in an insertion site, fused to the C-terminus of the FIX, or both as described herein.

[0234] In certain embodiments, the present disclosure includes a method of increasing expression of a FIX fusion protein comprising inserting a heterologous moiety in an insertion site, fused to the C-terminus of the FIX, or both as described herein, wherein the FIX fusion protein exhibits procoagulant activity

[0235] In still other embodiments, the disclosure provides a method of retaining procoagulant activity of a FIX fusion protein, comprising inserting a heterologous moiety in an insertion site, fusing a heterologous moiety to the C-terminus of the FIX, or both as described herein, wherein the FIX fusion protein exhibits procoagulant activity.

### IV. Pharmaceutical Compositions and Methods of Treatment

[0236] The present disclosure further provides a method for preventing, treating, ameliorating, or managing a clotting disease or condition or a bleeding condition in a human subject in need thereof using a pharmaceutical composition comprising a FIX fusion protein of the disclosure. An exemplary method comprises administering to the subject in need thereof a therapeutically effective amount of a pharmaceutical composition/formulation comprising a FIX fusion protein of the disclosure. In other aspects, a composition comprising a DNA encoding the fusion protein of the disclosure can be administered to a subject in need thereof. In certain aspects of the disclosure, a cell expressing a FIX fusion protein of the disclosure can be administered to a subject in need thereof. In certain aspects of the disclosure, the pharmaceutical composition comprises (i) a FIX fusion protein, (ii) an isolated nucleic acid encoding a FIX fusion protein, (iii) a vector comprising a nucleic acid encoding a FIX fusion protein, (iv) a cell comprising an isolated nucleic acid encoding a FIX fusion protein and/or a vector comprising a nucleic encoding a FIX fusion protein, or (v) a combination thereof, and the pharmaceutical compositions further comprises an acceptable excipient or carrier.

[0237] In one aspect, the present disclosure is directed to a method of administering a Factor IX (FIX) fusion protein, comprising administering to a subject a FIX fusion protein, wherein (a) the FIX fusion protein comprises a FIX polypeptide and at least one XTEN, which is inserted within the FIX polypeptide at an insertion site corresponding to an amino acid selected from the group consisting of amino acid 103 of SEQ ID NO: 2, amino acid 105 of SEQ ID NO: 2, amino acid 142 of SEQ ID NO: 2, amino acid 149 of SEQ ID NO: 2, amino acid 162 of SEQ ID NO: 2, amino acid 166 of SEQ ID NO: 2, amino acid 174 of SEQ ID NO: 2, amino acid 224 of SEQ ID NO: 2, amino acid 226 of SEQ ID NO: 2, amino acid 228 of SEQ ID NO: 2, amino acid 413 of SEQ ID NO: 2, and any combination thereof, (b) wherein the FIX fusion protein is administered subcutaneously; and (c) wherein following the administration, the FIX fusion protein exhibits a plasma activity of from about 1% to about 30%, e.g., about 5% to about 30%.

[0238] In some embodiments, following the administration of the FIX fusion protein disclosed herein, the plasma activity of a FIX fusion protein is from about 1% to about 30%, e.g., 5% to 30%, e.g., 1% to 20%, e.g., 5% to 20%, e.g., 1% to 10%, e.g., 5% to 10%, e.g., about 10% to about 30%, about 10% to about 20% during the treatment (e.g., from the first administration to the second administration). For example, the plasma activity after administration of a FIX fusion protein disclosed herein can be higher than 1%, 2%, 3%, 4%, 5%, 6%, 7%, 8%, 9%, or 10% and lower than 30%, 29%, 28%, 27%, 26%, 25%, 24%, 23%, 22%, 21%, 20%, 19%, 18%, 17%, 16%, 15%, 14%, 13%, 12%, or 11% during the duration of the treatment (e.g., from the first administration to the second, third, fourth, fifth, sixth, seventh, eighth, ninth, or tenth (or higher) administration).

[0239] In some embodiments, the FIX fusion protein is administered at an effective dose.

[0240] In certain embodiments, the FIX fusion protein is administered at a dose of about 1 IU/kg to about 500 IU/kg. In some embodiments, the FIX fusion protein is administered at a dose of about 50 IU/kg to about 300 IU/kg, about 50 IU/kg to about 250 IU/kg, about 50 IU/kg to about 200 IU/kg, about 50 IU/kg to about 150 IU/kg, about 50 IU/kg to about 100 IU/kg, about 100 IU/kg to about 300 IU/kg, about 150 IU/kg to about 300 IU/kg, about 200 IU/kg to about 300 IU/kg, about 250 IU/kg to about 300 IU/kg, about 100 IU/kg to about 250 IU/kg, about 100 IU/kg to about 200 IU/kg, about 100 IU/kg to about 150 IU/kg, about 150 IU/kg to about 250 IU/kg, or about 150 IU/kg to about 200 IU/kg. In one embodiment, the FIX fusion protein is administered at a dose of about 50 IU/kg to about 300 IU/kg.

[0241] In some embodiments, the FIX fusion protein is administered at a dose of about 25 IU/kg, about 50 IU/kg, about 75 IU/kg, about 100 IU/kg, about 125 IU/kg, about 150 IU/kg, about 175 IU/kg, about 200 IU/kg, about 225 IU/kg, about 250 IU/kg, about 275 IU/kg, about 300 IU/kg, about 325 IU/kg, about 350 IU/kg, about 375 IU/kg, or about 400 IU/kg. In one embodiment, the FIX fusion protein is administered at a dose of about 100 IU/kg. In another embodiment, the FIX fusion protein is administered at a dose of about 200 IU/kg.

[0242] In some embodiments, the FIX fusion protein exhibits a plasma activity peak value of about 1% to about 50%. In some embodiments, the FIX fusion protein exhibits a plasma activity peak value of about 5% to about 50%, about 10% to about 50%, about 15% to about 50%, about 20% to about 50%, about 25% to about 50%, about 30% to about 50%, about 35% to about 50%, about 40% to about 50%, about 10% to about 45%, about 15% to about 40%, about 20% to about 40%, about 20% to about 35%, about 25% to about 40%, or about 25% to about 35%. In certain embodiments, the FIX fusion protein exhibits a plasma activity peak value of about 10% to about 30%.

[0243] In some embodiments, the FIX fusion protein exhibits a plasma activity peak value of about 10%, about 11%, about 12%, about 13%, about 14%, about 15%, about 16%, about 17%, about 18%, about 19%, about 20%, about 21%, about 22%, about 23%, about 24%, about 25%, about 26%, about 27%, about 28%, about 29%, or about 30%. In one particular embodiment, the FIX fusion protein exhibits a plasma activity peak value of about 30%. In another embodiment, FIX fusion protein exhibits a plasma activity peak value of about 15%.

[0244] In some embodiments, the FIX fusion protein exhibits a plasma activity trough value of about 1% to about 20%. In certain embodiments, the FIX fusion protein exhibits a plasma activity trough value of about 5% to about 20%, about 10% to about 20%, about 15% to about 20%, about 1% to about 15%, about 1% to about 10%, about 1% to about 5%, or about 5% to about 15%. In one embodiment, the FIX fusion protein exhibits a plasma activity trough value of about 5% to about 10%.

[0245] In some embodiments, the FIX fusion protein exhibits a plasma activity trough value of about 1%, about 2%, about 3%, about 4%, about 5%, about 6%, about 7%, about 8%, about 9%, about 10%, about 11%, about 12%, about 13%, about 14%, or about 15%. In one particular embodiment, the FIX fusion protein exhibits a plasma activity trough value of about 5%.

[0246] The FIX fusion protein of the disclosure can be administered to a patient intravenously, subcutaneously, or orally. In certain embodiments, the FIX fusion protein is administered to a subject by intravenous injection. In other embodiments, the FIX fusion protein is administered to a subject by subcutaneous injection. The injections can comprise a single bolus. Subjects may receive more than one injection.

[0247] The fusion proteins of the disclosure can be used prophylactically. As used herein the term “prophylactic treatment” refers to the administration of a molecule prior to a bleeding episode. In one embodiment, the subject in need of a general hemostatic agent is undergoing, or is about to undergo, surgery. The fusion protein of the disclosure can be administered prior to or after surgery as a prophylactic. The fusion protein of the disclosure can be administered during or after surgery to control an acute bleeding episode. The surgery can include, but is not limited to, liver transplantation, liver resection, dental procedures, or stem cell transplantation.

[0248] The fusion protein of the disclosure is also used for on-demand treatment. The term “on-demand treatment” refers to the administration of a fusion protein in response to symptoms of a bleeding episode or before an activity that may cause bleeding. In one aspect, the on-demand treatment is given to a subject when bleeding starts, such as after an injury, or when bleeding is expected, such as before surgery. In another aspect, the on-demand treatment is given prior to activities that increase the risk of bleeding, such as contact sports.

[0249] In other embodiments, the fusion protein is used to control, ameliorate, or treat an acute bleeding episode. In other embodiments, the FIX fusion protein exhibits one or more pharmacokinetic parameters compared to a corresponding FIX protein without the heterologous moiety. PK parameters can be based on FIX antigen level (often denoted parenthetically herein as “antigen”) or FIX activity level (often denoted parenthetically herein as “activity”). In the literature, PK parameters are often based on FIX activity level due to the presence in the plasma of some subjects of endogenous, inactive FIX, which interferes with the ability to measure administered (i.e., exogenous) FIX using antibody against FIX. However, when FIX is administered as part of an Fc fusion protein as provided herein, administered (i.e., exogenous) FIX antigen can be accurately measured using antibody to the heterologous polypeptide. In addition, certain PK parameters can be based on model predicted data (often denoted parenthetically herein as “model predicted”) or on observed data (often denoted parenthetically herein as “observed”), and preferably are based on observed data.

[0250] The FIX fusion protein can be administered to a subject through any means known in the art. For example, the FIX fusion protein can be administered through topical (e.g., transdermal or ocular), oral, buccal, nasal, vaginal, rectal, or parenteral (e.g., subcutaneous, intradermal, intravascular/intravenous, intramuscular, spinal, intracranial, intrathecal, intraocular, periocular, intraorbital, intrasynovial, and intraperitoneal injection) administration. In one particular embodiment, the FIX fusion protein is administered via a subcutaneous injection. The subcutaneous injection can include one or more bolus, including, for example, a single bolus of a dose of the FIX fusion protein. Alternatively, the FIX fusion protein can be administered via intravenous injection.

[0251] The dose of the FIX fusion protein can vary depending on the nature of the particular fusion protein and the nature of the subject's condition. In some embodiments, the dose of the FIX fusion protein can comprise between 1 and 1000 IU/kg of the FIX fusion protein.

[0252] The bleeding condition can be caused by a blood coagulation disorder. A blood coagulation disorder can also be referred to as a coagulopathy. In one example, the blood coagulation disorder, which can be treated with a pharmaceutical composition of the current disclosure, is hemophilia. In another example, the blood coagulation disorder, which can be treated with a pharmaceutical composition of the present disclosure is hemophilia B.

[0253] In some embodiments, the type of bleeding associated with the bleeding condition is selected from hemarthrosis, muscle bleed, oral bleed, hemorrhage, hemorrhage into muscles, oral hemorrhage, trauma, trauma capitis, gastrointestinal bleeding, intracranial hemorrhage, intra-abdominal hemorrhage, intrathoracic hemorrhage, bone fracture, central nervous system bleeding, bleeding in the retropharyngeal space, bleeding in the retroperitoneal space, and bleeding in the illiopsoas sheath.

[0254] In other embodiments, the subject suffering from bleeding condition is in need of treatment for surgery, including, e.g., surgical prophylaxis or peri-operative management. In one example, the surgery is selected from minor surgery and major surgery. Exemplary surgical procedures include tooth extraction, tonsillectomy, inguinal herniotomy, synovectomy, craniotomy, osteosynthesis, trauma surgery, intracranial surgery, intra-abdominal surgery, intrathoracic surgery, joint replacement surgery (e.g., total knee replacement, hip replacement, and the like), heart surgery, and caesarean section.

[0255] In another example, the subject is concomitantly treated with Factor VIII. Because the compounds of the disclosure are capable of activating FIXa, they could be used to pre-activate the FIXa polypeptide before administration of the FIXa to the subject.

[0256] The methods of the disclosure may be practiced on a subject in need of prophylactic treatment or on-demand treatment.

[0257] Pharmaceutical compositions comprising a FIX fusion protein of the disclosure may be formulated for any appropriate manner of administration, including, for example, topical (e.g., transdermal or ocular), oral, buccal, nasal, vaginal, rectal or parenteral administration.

[0258] The term parenteral as used herein includes subcutaneous, intradermal, intravascular (e.g., intravenous), intramuscular, spinal, intracranial, intrathecal, intraocular, periocular, intraorbital, intrasynovial and intraperitoneal injection, as well as any similar injection or infusion technique. In particular, the pharmaceutical compositions comprising a FIX fusion protein of the disclosure may be formulated for subcutaneous administration. The composition can be also for example a suspension, emulsion, sustained release formulation, cream, gel or powder. The composition can be formulated as a suppository, with traditional binders and carriers such as triglycerides.

[0259] In one example, the pharmaceutical formulation is a liquid formulation, e.g., a buffered, isotonic, aqueous solution. In another example, the pharmaceutical composition has a pH that is physiologic, or close to physiologic. In other examples, the aqueous formulation has a physiologic or close to physiologic osmolarity and salinity. It can contain sodium chloride and/or sodium acetate. In some examples, the composition of the present disclosure is lyophilized.

[0260] A fusion protein thereof of the disclosure can be produced in vivo in a mammal, e.g., a human patient, using a gene therapy approach to treatment of a bleeding disease or disorder selected from the group consisting of a bleeding coagulation disorder, hemarthrosis, muscle bleed, oral bleed, hemorrhage, hemorrhage into muscles, oral hemorrhage, trauma, trauma capitis, gastrointestinal bleeding, intracranial hemorrhage, intra-abdominal hemorrhage, intrathoracic hemorrhage, bone fracture, central nervous system bleeding, bleeding in the retropharyngeal space, bleeding in the retroperitoneal space, and bleeding in the illiopsoas sheath would be therapeutically beneficial. In one embodiment, the bleeding disease or disorder is hemophilia. In another embodiment, the bleeding disease or disorder is hemophilia B. This involves administration of a suitable fusion protein-encoding nucleic acid operably linked to suitable expression control sequences. In certain embodiment, these sequences are incorporated into a viral vector. Suitable viral vectors for such gene therapy include adenoviral vectors, lentiviral vectors, baculoviral vectors, Epstein Barr viral vectors, papovaviral vectors, vaccinia viral vectors, herpes simplex viral vectors, and adeno associated virus (AAV) vectors. The viral vector can be a replication-defective viral vector. In other embodiments, an adenoviral vector has a deletion in its E1 gene or E3 gene. When an adenoviral vector is used, the mammal may not be exposed to a nucleic acid encoding a selectable marker gene. In other embodiments, the sequences are incorporated into a non-viral vector known to those skilled in the art.

[0261] The practice of the present disclosure will employ, unless otherwise indicated, conventional techniques of cell biology, cell culture, molecular biology, transgenic biology, microbiology, recombinant DNA, and immunology, which are within the skill of the art. Such techniques are explained fully in the literature. See, for example, Molecular Cloning A Laboratory Manual, 2nd Ed., Sambrook et al., ed., Cold Spring Harbor Laboratory Press: (1989); Molecular Cloning: A Laboratory Manual, Sambrook et al., ed., Cold Springs Harbor Laboratory, New York (1992), DNA Cloning, D. N. Glover ed., Volumes I and II (1985); Oligonucleotide Synthesis, M. J. Gait ed., (1984); Mullis et al. U.S. Pat. No. 4,683,195; Nucleic Acid Hybridization, B. D. Hames & S. J. Higgins eds. (1984); Transcription And Translation, B. D. Hames & S. J. Higgins eds. (1984); Culture Of Animal Cells, R. I. Freshney, Alan R. Liss, Inc., (1987); Immobilized Cells And Enzymes, IRL Press, (1986); B. Perbal, A Practical Guide To Molecular Cloning (1984); the treatise, Methods In Enzymology, Academic Press, Inc., N.Y.; Gene Transfer Vectors For Mammalian Cells, J. H. Miller and M. P. Calos eds., Cold Spring Harbor Laboratory (1987); Methods In Enzymology, Vols. 154 and 155 (Wu et al. eds.); Immunochemical Methods In Cell And Molecular Biology, Mayer and Walker, eds., Academic Press, London (1987); Handbook Of Experimental Immunology, Volumes I-IV, D. M. Weir and C. C. Blackwell, eds., (1986); Manipulating the Mouse Embryo, Cold Spring Harbor Laboratory Press, Cold Spring Harbor, N.Y., (1986); and in Ausubel et al., Current Protocols in Molecular Biology, John Wiley and Sons, Baltimore, Md. (1989).

[0262] Standard reference works setting forth general principles of immunology include Current Protocols in Immunology, John Wiley & Sons, New York; Klein, J., Immunology: The Science of Self-Nonself Discrimination, John Wiley & Sons, New York (1982); Roitt, I., Brostoff, J. and Male D., Immunology, 6^{th} ed. London: Mosby (2001); Abbas A., Abul, A. and Lichtman, A., Cellular and Molecular Immunology, Ed. 5, Elsevier Health Sciences Division (2005); and Harlow and Lane, Antibodies: A Laboratory Manual, Cold Spring Harbor Press (1988).

[0263] Having now described the present disclosure in detail, the same will be more clearly understood by reference to the following examples, which are included herewith for purposes of illustration only and are not intended to be limiting of the disclosure.

### EXAMPLES

### Example 1: Identification of Active FIX-XTEN Variants

[0264] FIX fusion proteins comprising a FIX polypeptide with one or more XTEN insertions to improve the properties of the FIX protein were constructed. However, the location, length, composition and number of XTEN modifications can be readily varied, and impact of these modifications on the activity and clearance of FIX can be evaluated.

[0265] The present example aims to identify sites in FIX that can accommodate the introduction of XTENs without abrogating FIX activity and apply this approach to both otherwise non-modified FIX and a recombinant FIX-Fc fusion protein.

### Methods

[0266] The FIX polypeptide coding sequence was ligated into expression vector pcDNA4/myc-His C (INVITROGEN™, Carlsbad, Calif.) between the BsiWI and Pmel sites following introduction of a Kozak translation initiation sequence (GCCGCCACC) immediately 5′ to the ATG codon encoding the start Met residue.

[0267] HEK293F cells (INVITROGEN™, Carlsbad, Calif.) were transfected with plasmid using polyethyleneimine (PEI, Polysciences Inc., Warrington, Pa.). The transiently transfected cells were grown in FREESTYLE™ 293 medium or a mixture of FREESTYLE™ 293 and CD OPTICHO™ media (INVITROGEN™, Carlsbad, Calif.). The cell culture medium was harvested 5 days after transfection and analyzed for FIX activity by chromogenic or aPTT FIX activity assay.

[0268] The chromogenic FIX activity was measured using the BIOPHEN Factor IX kit from Aniara and all incubations were performed on a 37° C. plate heater with shaking. Cell culture harvests from transient transfection media of FIX-XTEN variants from 6 well plates were diluted to the desired FIX activity range using Tris-BSA dilution buffer (R4). FIX standards were also prepared in Tris-BSA dilution buffer. The standards, diluted cell culture samples, and a pooled normal human plasma assay control (50 μL/well) were added to IMMULON® 2HB 96-well plates in duplicates. Human Factor X, FVIII:C and fibrin polymerization inhibitor (50 μL), 50 μL of mixture of Factor XIa, with thrombin, phospholipids and Calcium, and 50 μL of Factor Xa specific Chromogenic substrate (SXa-11) were added sequentially into each well, with 2 minutes incubation between each addition. After incubating with the substrate, 50 μL of 20% acetic acid was added to terminate the color reaction, and the absorbance at 405 nm was measured with a SPECTRAMAX® plus (MOLECULAR DEVICES®) instrument. Data analysis was performed using SOFTMAX® Pro Software (version 5.2).

[0269] A one stage activated partial thromboplastin time (aPTT) coagulation assay was employed to assess FIX activity. The FIX-XTEN aPTT activity was measured using the SYSMEX® CA-1500 instrument (Siemens Healthcare Diagnostics Inc., Tarrytown, N.Y.). To create a standard curve for the assay, WHO Factor IX standard was diluted with mock transfection media with matching culture media concentration as the testing sample. Cell culture harvests from transient transfection media of FIX-XTEN variants from 6 well plates were diluted to the desired FIX activity range using mock transfection media. After dilution, the aPTT assay was performed using the Sysmex instrument as follow: 50 μl of diluted standards and samples were mixed with 50 μl Siemens human FIX depleted Plasma and then 50 μl of Siemens Actin FSL (ellagic acid) activator. The mixture was incubated for 1 min. Subsequently, 50 μl of Siemens CaCl₂) was added to the mixture and the mixture was incubated for 240 seconds. The clotting time was measured immediately following this incubation. To determine test samples FIX activity, the clotting times of the standards were plotted using log scales to extrapolate the equation between clotting time and FIX activity, and FIX-XTEN activity was then calculated against the standard curve.

### Selection of Insertion Sites

[0270] FIX structures from Protein Data Bank, 1PFX, 1IXA, 1CFI, 1CFH, 1EDM, 3LC3, 3LC5, 1RFN, 1X7A and 3KCG, were analyzed to select sites in FIX for XTEN insertion. XTEN insertion within the GLA domain was avoided due to the essential role of the GLA domain in anchoring FIX to phospholipid surfaces and subendothelial type IV collagen. XTEN insertion sites were selected by analysis of available FIX structures in the Protein Data Bank in conjunction with the following criteria: 1) calculated accessible surface area by algorithm software ASA View (http://www.abren.net/asaview/) and Get Area (http://curie.utmb.edu/getarea.html), 2) solvent accessibility assessed by hydrogen/deuterium exchange mass spectrometry (H/DX-MS), 3) exclusion of sites within defined secondary structural elements, 4) preference for positions with significant inter-species protein sequence variability, and 5) exclusion of sites proximal to known hemophilia B mutations.

[0271] Four sites in the EGF1 domain, 5 sites in the EGF2 domain, 2 sites in the linker region between the AP domain and the EGF2 domain, 4 sites in the AP (activation peptide) domain and 18 sites in the catalytic domain were selected for insertion of XTEN (Table 6).

TABLE 6
Potential sites for XTEN insertion into FIX (insertion
at the c-terminus of the indicated residue)

| FIX Domain | Selected Sites |
|---|---|
| EGF1 | E52, G59, I66, K80 |
| EGF2 | D85, N89, A103, N105, E113 |
| Linker | P129, K142 |
| AP | V149, E162, D166, S174 |
| Catalytic | K188, V202, E224, G226, K228, T230, |
| | E240, H257, K265, E277, S283, D292, |
| | K316, K341, H354, K392, R403, K413 |

### Activity Screen of 42-Amino Acid XTEN Insertions and C-Terminal Fusion

[0272] The highly active FIX Padua variant (R338L) was used as a scaffold to counter potential FIX activity loss due to reduced activity caused by the introduction of XTENs. A_42-residue XTEN element (AE42) was inserted at sites selected by using the criteria above or fused at the C-terminus of FIX. FIX activities of these variants were evaluated in conditioned medium of transfected HEK293 cells as described above. FIX activities of FIX-AE42s are shown as percentage of the base construct without XTEN, FIX-R338L (FIG. 1).

[0273] XTEN insertion was tolerated at limited sites as determined by FIX chromogenic assay (FIG. 1 and Table 7). A total of 33 sites in FIX were selected and evaluated by insertion of AE-42. Of these, two in the EGF2 domain, one in the linker region between the EGF2 domain and the AP domain, four in the AP domain, and four in the catalytic domain, including the C terminus, were identified as permissive sites by FIX activity assay (FIG. 1 and Table 7).

TABLE 7
Example FIX Insertion Sites

| Insertion | | Activity | Activity | Activity | Activity | Activity |
|---|---|---|---|---|---|---|
| Site | Domain | AE42 | AE72 | AE144 | AE288 | AE4864 |
| 52 | EGF1 | ND | | | | |
| 59 | EGF1 | ND | | | | |
| 66 | EGF1 | ND | | | | |
| 80 | EGF1 | ND | | | | |
| 85 | EGF2 | ND | | | | |
| 89 | EGF2 | ND | | | | |
| 103 | EGF2 | + | ND | ND | ND | ND |
| 105 | EGF2 | + | ND | ND | ND | ND |
| 113 | EGF2 | ND | | | | |
| 129 | EGF2-AP Linker | ND | | | | |
| 142 | EGF2-AP Linker | ++ | ND | ND | ND | ND |
| 149 | AP | +++ | + | + | + | ND |
| 162 | AP | ++ | + | + | + | ND |
| 166 | AP | +++ | + | + | + | ND |
| 174 | AP | +++ | + | + | + | ND |
| 188 | Catalytic Domain | ND | | | | |
| 202 | Catalytic Domain | + | | | | |
| 224 | Catalytic Domain | + | + | ND | ND | ND |
| 226 | Catalytic Domain | + | | | | |
| 228 | Catalytic Domain | + | | | | |
| 230 | Catalytic Domain | ND | | | | |
| 240 | Catalytic Domain | ND | | | | |
| 257 | Catalytic Domain | + | | | | |
| 265 | Catalytic Domain | ND | | | | |
| 277 | Catalytic Domain | ND | | | | |
| 283 | Catalytic Domain | ND | | | | |
| 292 | Catalytic Domain | ND | | | | |
| 316 | Catalytic Domain | ND | | | | |
| 341 | Catalytic Domain | ND | | | | |
| 354 | Catalytic Domain | ND | | | | |
| 392 | Catalytic Domain | ND | | | | |
| 403 | Catalytic Domain | ND | | | | |
| 413 | Catalytic Domain | ++ | + | + | + | ND |
| 415 | C-Terminus | +++ | +++ | ++ | ++ | + |

Note:
ND = No activity detected; (+) = less than 30% activity detected; (++) = between 30% and 70% activity detected; and (+++) = greater than 70% activity detected as percent of base construct, by chromogenic assay (see FIGS. 5A-5C and 6A-6B).

### Activity of Longer XTEN Insertions and C-Terminal Fusion

[0274] Longer XTENs (AE-72, -144 and -288) were then similarly tested at sites shown to be permissive for AE42 insertion. FIX activities were determined as previously described and are shown as percentage of the base construct without XTEN, FIX-R338L (FIG. 2).

[0275] Only sites in AP and sites at or close to the C-terminus of FIX tolerated longer XTENs (AE144, AE288 or AE864) (FIG. 2). FIX activity detected in conditioned medium inversely correlated with the length of XTEN introduced (FIG. 2, table 7). Four insertion permissive sites in different domains of FIX were selected to generate a combinatorial library.

### Multiple XTEN Insertions

[0276] Based on results obtained with single XTEN variants, FIX variants with multiple XTEN insertions of varying lengths and at four different locations (see FIG. 4 and Table 8) were evaluated for FIX activity in conditioned medium of transfected HEK293 cells, by aPTT assay (Tables 8-10). FIX activities are shown as percentage of the base construct without XTEN, FIX-R338L (FIG. 4).

TABLE 8
Example FIX Double Insertions

| Insertion | XTEN 1 | Insertion | XTEN 2 | |
|---|---|---|---|---|
| Site 1 | (or Fc) | Site 2 | (or Fc) | Activity |
| 105 | AE42 | | | ++ |
| 166 | AE42 | | | ++ |
| 166 | AE72 | | | + |
| 166 | AE144 | | | + |
| 224 | AE42 | | | + |
| C-Term | AE72 | | | ++ |
| C-Term | AE144 | | | + |
| C-Term | AE288 | | | + |
| C-Term | Fc | | | ++ |
| 166 | AE42 | C-Term | AE72 | ++ |
| 166 | AE42 | C-Term | AE144 | + |
| 166 | AE42 | C-Term | AE288 | + |
| 166 | AE72 | C-Term | AE72 | + |
| 166 | AE72 | C-Term | AE144 | + |
| 166 | AE72 | C-Term | AE288 | + |
| 166 | AE144 | C-Term | AE72 | + |
| 166 | AE144 | C-Term | AE144 | + |
| 166 | AE144 | C-Term | AE288 | + |
| 105 | AE42 | 166 | AE42 | + |
| 105 | AE42 | 166 | AE72 | + |
| 105 | AE42 | 166 | AE144 | ND |
| 105 | AE42 | C-Term | AE72 | + |
| 105 | AE42 | C-Term | AE144 | + |
| 105 | AE42 | C-Term | AE288 | + |
| 105 | AE42 | 224 | AE42 | + |
| 166 | AE42 | 224 | AE42 | + |
| 166 | AE72 | 224 | AE42 | + |
| 166 | AE144 | 224 | AE42 | ND |
| 224 | AE42 | C-Term | AE72 | + |
| 224 | AE42 | C-Term | AE144 | + |
| 224 | AE42 | C-Term | AE288 | + |
| 105 | AE42 | C-Term | Fc | + |
| 224 | AE42 | C-Term | Fc | + |
| 166 | AE42 | C-Term | Fc | + |
| 166 | AE72 | C-Term | Fc | + |
| 166 | AE144 | C-Term | Fc | + |

Note:
ND = No activity detected; (+) = less than 30% activity detected; (++) = between 30% and 70% activity detected; and (+++) = greater than 70% activity detected as percent of base construct, by chromogenic assay (see FIGS. 8A-8C).

TABLE 9
XTEN Elements Inserted into Each Domain

| Location | Element |
|---|---|
| EGF2 | AE42 |
| AP | AE42, AE72, AE144 |
| Catalytic 60-loop | AE42 |
| C-term | AE72, AE144, AE288, Fc |

TABLE 10
Total Number of Constructs Inserted as Single, Dual, Triple, and
Quadruple Combinations

| Combination | # Constructs |
|---|---|
| Single | 9 |
| Dual | 27 |
| Triple | 31 |
| Quadruple | 12 |
| | Total 79 |

[0277] Three groups, FIX with a single XTEN, FIX with dual XTEN insertions and FIX-Fc with a single XTEN insertion, showed detectable activity, while combination of insertion/fusion at three or more sites abolished FIX activity (FIG. 4).

[0278] In conclusion, several permissive sites for XTEN insertion are present in FIX and select combinations of XTEN insertions variants retain FIX activity. Active FIX-XTEN variants identified here are candidates for pharmacokinetic characterization in hemophilia B mice.

### Example 2: FIX Fusion Proteins and its Plasma Recovery and AUC/D

[0279] Factor IX deficient (HemB, B6.129P2-F9tm1Dws/J, MGI:1932297) mice (Lin. et al., 1997) were originally acquired from Dr. Darrel Stafford (University of North Carolina, Chapel Hill). Male/female HemB mice were each injected intravenously with a single intravenous bolus injection of 50 or 200 IU/kg of FIX fusion proteins (e.g., FIX-CT.288 (AE288 XTEN fused to the C-terminus of an FIX polypeptide), FIX-CT.864 (AE864 XTEN fused to the C-terminus of an FIX polypeptide), FIX-AP.144 (AE144 XTEN inserted after D166 within the AP domain of a FIX polypeptide), FIX-AP.72 (AE72 XTEN inserted after D166 within the AP domain of a FIX polypeptide), FIX-AP.42 (AE42 XTEN inserted after D166 within the AP domain of a FIX polypeptide), FIXFc, and FIX) at a dosing volume of 10 mL/kg at t=0 hour. Blood was collected at 5 minutes post dosing up to 168 hours (7 days) post dosing. For each indicated time point 100 μl citrated blood was collected by retroorbital or terminal vena cava bleeding from 3-4 mice per time point. Up to 3 time points per mouse were generated. Plasma was isolated by centrifugation at 5000 rpm for 8 minutes and plasma samples were snap frozen in a dry-ice ethanol bath and stored at −80° C. until they were analyzed with one stage activated thromboplastin time (aPTT)-assay on a Sysmex-CA1500 coagulation analyzer, using Dade Behring reagents and actin FSL as activator and dosing material as activity standards. In FIGS. 5A-5B the plasma activities are plotted as % of injected dose. Mean Residence Time (MRT) and other pharmacokinetic (PK) parameters were calculated using non-compartmental modeling with Phoenix WinNonlin 6.2.1 (Pharsight, Certera by NCA analysis). FIG. 5C depicts the relative plasma recoveries (Y-axis) versus MRT (X-axis). The area of the dots represent the Area under the Curve per Dose (AUC/D, in h/kg/mL) and shows that FIX plasma activity recovery and AUC/D increase with increasing XTEN length (FIG. 5C). The figures show that the FIX fusion proteins with increased XTEN length (288 and 864 at the C-terminus or 144, 72, and 42 in the AP domain) exhibit a size-dependent increase in plasma recovery up to 60% and increased AUC/D following intravenous bolus dosing.

### Example 3: FIX Fusion Proteins and their Half-Life

[0280] FIX deficient mice were intravenously dosed with 50 or 200 IU/kg of the FIX fusion proteins: FIX fused to an XTEN with 288 amino acids (e.g., AE288); FIX-Fc wherein an XTEN with 72 amino acids (e.g., AE72) is inserted at the AP domain after D166; FIX-Fc wherein an XTEN with 42 amino acids (e.g., AE42) is inserted at the AP domain after D166; and controls (e.g., FIXFc and FIX). Plasma was collected and FIX activity and PK analysis was performed identically to the methods described in Example 5. FIG. 6A plots the plasma activities as % of injected dose. Pharmacokinetic (PK) parameters were calculated using WinNonlin 6.2.1 (Pharsight, Certera by NCA analysis and FIG. 6B depicts the relative plasma recoveries (Y-axis) versus MRT (X-axis). The area of the dots represents the Area under the Curve per Dose (AUC/D, in h/kg/mL) and shows that insertion of XTEN sequences into the activation peptide (AP) domain of FIXFc extends the mean residence time longer than that of rFIXFc alone compared to FIX (FIG. 6B). In addition, plasma activity recovery and AUC/D are improved with increasing XTEN length (FIGS. 6A-6B). The AUC/D for rFIX-CT.288 (SEQ ID NO: 226) and rFIXFc-AP.72 (SEQ ID NO: 151) were 3.4 and 4.5-fold improved in comparison to rFIXFc, respectively (FIGS. 6A-6B). This is equivalent to a 8.5 and 14.5 fold improvement of AUC/D when compared to intravenously dosed rFIX, respectively (FIGS. 6A-6B). Therefore, combinations of XTEN insertions in the AP domain with Fc-mediated half-life extension in rFIXFc-R338L extend both the half-life and increase in the plasma recovery and AUC/Dose compared to that of rFIX and rFIXFc.

### Example 4: Improved Pharmacokinetics of FIX Fusion Proteins by Subcutaneous Delivery

[0281] FIX deficient mice were subcutaneously dosed at t=0 with 50 or 200 IU/kg of the FIX fusion proteins: FIX fused to an XTEN of 288 amino acids (e.g., AE288) at the C terminus (FIX-CT.288); FIXFc having an XTEN of 72 amino acids (e.g., AE72) in the AP domain (FIXFc-AP.72); FIXFc having an XTEN of 42 amino acids (e.g., AE42) in the EGF2 domain (e.g., FIXFc-EGF.42); and controls (FIXFc and FIX). Plasma was collected and FIX activity and PK analysis was performed identically to the methods described in Example 1. FIG. 7A plots the plasma activities as % of injected dose. Pharmacokinetic (PK) parameters were calculated using WinNonlin 6.2.1 (Pharsight, Certera by NCA analysis, and FIG. 7B depicts the relative bioavailability (Y-axis) versus MRT (X-axis). The area of the dots represents the Area under the Curve per Dose (AUC/D, in h/kg/mL) and shows that fusion of XTEN polypeptide sequences at the carboxy-terminus of rFIX or insertion of XTEN sequences into the activation peptide (AP) domain or EGF2 domain of FIXFc greatly improves the subcutaneous dosing profile of the FIX fusion proteins (FIG. 7B). rFIXFc-AP.72 and rFIX-CT.288 have a 6 to 9-fold improved AUC/D, 1.5 to 2 fold improved bioavailability and 3 to 10 fold improved Cₘₐₓ/D for, compared to rFIXFc in HemB mice for subcutaneous dosing. When compared to rFIX the improvement in pharmacokinetic parameters is 28 to 40-fold improved AUC/D, 3-fold increased bioavailability and 15 to 30-fold improved Cₘₐₓ/D compared to rFIX for FIXFc-AP.72 and rFIX-CT.288, respectively (FIGS. 7A-7B).

[0282] Taken together, the FIX fusion proteins (e.g., rFIX-CT.288 and rFIXFc-AP.72) showed a 2.6- and 1.9-fold improved AUC/D for subcutaneous dosing when compared to intravenous dosing of rFIXFc, the latter supporting once weekly or less frequent intravenous dosing in humans for prophylaxis.

### Example 5: In Vitro Efficacy of FIX Fusion Proteins

[0283] Human hemophilia-B blood was spiked with the indicated doses of 3 10, and 30 IU/dL of rFIXFc (open circles, dotted line) or a FIX fusion protein (e.g., rFIXFc-AP.72) (solid dots, solid line) or vehicle (open triangle) (FIGS. 8A-8C). Whole blood clotting characteristics were determined using rotational thromboelastometry (ROTEM) and coagulation was initiated by recalcification of the blood (NATEM). rFIXFc-AP.72 showed similar activity compared to rFIXFc in hemophila-B blood, in respect to clotting time (CT in seconds), alpha angle (in degrees) and maximum clot firmness (MCF in mm) (FIGS. 8A-8C). The data each time point is the average+/−standard deviation of 4 to 5 replicate samples (FIGS. 8A-8C).

[0284] rFIXFc-AP.72 and rFIX-CT.288 show greatly improved subcutaneous pharmacokinetics in HemB mice compared to both rFIX and rFIXFc. Further studies are ongoing to address the efficacy and allometric scaling in preclinical animal models.

### Example 6: In Vivo Efficacy of rFIXFc-AP.72 in an Acute Murine Tail Clip Bleeding Model

[0285] Acute efficacy was studied in a blinded murine tail-clip bleeding model, in which total blood loss in dosed mice is measured after tail tip amputation, as described previously (Dumont et al., Blood, 119(13):3024-3030, 2012). Briefly, 8-15 weeks old male Hemophilia B mice (Lin et al., Blood (1997) 90: 3962-3966) were anesthetized with a cocktail of 50 mg/kg ketamine and 0.5 mg/kg dexmedetomidine. The tails were immersed in 37° C. saline for 10 minutes, to dilate the lateral vein followed by intravenous tail vein injection of either vehicle (3.88 g/L L-Histidine, 23.8 g/L Mannitol, 11.9 g/L Sucrose, 3.25 g/L Sodium Chloride, 0.01% (w/v) Polysorbate 20 (pH 7.1), 3% human serum albumin), rFIXFc-AP.72, or rFIXFc at 50, 100, and 200 IU/kg. Five minutes post-dosing, the 5 mm distal tip of the tail was clipped and submerged into a pre-weighted tube containing 13 mL saline for the period of 30 minutes. Blood loss was quantified by weight. Statistical significance was calculated using unpaired two-tailed t-test in GraphPad Prism 6. Such two tailed t-tests showed that the 50, 100, and 200 IU/kg doses of rFIXFc-AP.72 were significantly different from vehicle (p-value <0.0001). In addition, the data show that a low dose, e.g., 50 IU/kg, of rFIXFc-AP.72 results in significantly lower blood loss compared to the same low dose, i.e., 50 IU/kg, of rFIXFc. These results demonstrate equal or improved acute efficacy for rFIXFc-AP.72 compared to rFIXFc in this bleeding model.

### Example 7: In Vivo Efficacy of FIXFc-AP.72 in a Prophylactic Murine Tail Vein Transection Bleeding Model

[0286] Prolonged efficacy was studied in a blinded murine tail vein transection (TVT) bleeding model, in which survival time of dosed hemophilia-B mice is measured after transection of one lateral tail vein, as described previously (Toby et al., PLOS One, DOI:10.1371/journal.pone.0148255, 2016; Pan et al., Blood 114:2802-2822 (2009)). Briefly, 8-15 weeks old male hemophilia B mice (Lin et al., Blood 90: 3962-3966 (1997)) were pre-dosed intravenously with 15, 50, 100 IU/kg FIX activity of rFIXFc or matching subcutaneous doses of FIXFc-AP.72 and compared to mice receiving a bolus dose of vehicle. At 72 hours post dosing, all mice were anesthetized and one lateral tail vein was transected at a 2.7 mm tail diameter. During the 9 to 11 hours immediately following the TVT and then at an overnight time point at 24 hours, qualitative end points were monitored and recorded hourly, including rebleeding and time to death (as defined as the time to euthanization, as determined when the animal was moribund). All mice were euthanized at the end of 24 hour study, while animals not dead or moribund were determined to have survived at 24 hours.

[0287] Data were plotted as percent survival following TVT using GraphPad Prism 6. Mice dosed subcutaneously with vehicle (dotted line), subcutaneously with FIXFc-AP.72 (solid lines, closed symbols) or intravenously dosed with FIXFc (dashed lines, open symbols) (15 IU/kg, 50 IU/kg, 100 IU/kg n=20/dose except for vehicle dose; n=30) (FIG. 10). The survival curves for mice treated with matching IU/kg doses of subcutaneously dosed FIXFc-AP.72 versus intravenously dosed rFIXFc showed improved survival of HemB mice dosed subcutaneously with FIXFc-AP.72 compared to the equivalent intravenously dosed rFIXFc at all doses tested (FIG. 10).

### Example 8: Improved Intravenous and Subcutaneous Pharmacokinetic Parameters for FIXFc-AP.72 (FIX-216, Dual Chain Fc) Compared to rFIX in HemB Mice

[0288] Hemophilia-B mice were dosed with either 200 IU/kg FIXFc-AP.72 (FIX-216, dual chain Fc) or rFIX. Blood was collected by retro-orbital bleeding at the indicated times. Plasma levels of FIX were determined by one-stage clotting assay activity using dosing material as activity standards. In FIG. 11A plasma activity is plotted as % of injected dose. FIG. 11B shows a table of the pharmacokinetic parameters calculated using Phoenix WinNonLin 6.2.1 (Pharsight, Certara) by NCA (non-compartmental) analysis. Improved pharmacokinetic parameters shown for FIX-216 versus rFIX include the Mean Residence Time (MRT), the AUC/dose and other parameters.

[0289] Subcutaneous dosing of FIXFc-AP.72 shows a tₘₐₓ around 20 hours post dosing in mice, and improved plasma activity levels compared to similar (IU/kg) intravenously dosed rFIX or rFIXFc. Using the TVT bleeding model in HemB mice we show that at 72 hours post dosing, subcutaneously dosed FIXFc-AP.72 has improved in vivo efficacy compared to intravenously dosed rFIXFc at all tested doses. Similarly, acute efficacy testing in the HemB mouse tail-clip bleeding model showed improved efficacy of intravenously dosed FIXFc-AP.72 compared to rFIXFc. These data support the potential of once weekly or less frequent subcutaneous prophylactic dosing of FIXFc-AP.72 in humans.

### Example 9: PK Dose Linearity of SQ rFIXFc-XTEN

[0290] The PK dose linearity of subcutaneously dosed rFIXFc-AP.72 (pJH84; SEQ ID NO: 151) was evaluated in HemB mice. Three groups of four mice each were dosed with 50, 100, 200 or 400 IU/kg rFIXFc-AP.72. Blood was collected from each mouse at three sequential time points by retro-orbital bleed collection in 10% w/v citrate (i.e., 1, 6, 24, 48, 72, 96, 144, 168 and 192 hours post-administration). FIX activity was measured by the one-stage activity assay to self-standard. Dosing solutions were confirmed against FIX WHO standard. Pharmacokinetic analysis was done using Phoenix program (Pharsight Corp, Mountainview, Calif.). The plasma FIX activities and calculated recoveries are shown in FIG. 14A and FIG. 14B, respectively. FIX activity curves run parallel for the increasing doses (FIG. 14A) and overlap when plotted as percentile recovery of injected dose (%) (FIG. 14B), indicating dose linearity in the dose range of 50-400 IU/kg in HemB mice. The dose linearity was confirmed by the PK parameters for each tested dose, as calculated by Phoenix WinNonLin software using non compartmental analysis of the actual measured dose and matching plasma activity level data (FIG. 14C).

### Example 10: Pharmacokinetics of rFIXFc-XTEN in Cynomolgus Monkeys

[0291] Three naïve male cynomolgus monkeys per cohort were each administered 100 IU/kg rFIXFc-XTEN (pJH84; SEQ ID NO: 151) by either intravenous or subcutaneous dosing route. Blood was collected at the indicated time points, pre and post doing (FIG. 15A). Plasma levels of FIX were determined by rFIXFc-XTEN specific ELISA (XTEN-capture and human FIX detection), as well as by a modified (XTEN-capture) FIX chromogenic activity assay that measured rFIXFc-XTEN specific plasma activity. Dosing was confirmed against FIX WHO standard and rFIXFc-XTEN plasma levels were determined using rFIXFc-XTEN as standard. In FIG. 15A, the average±standard deviation of plasma antigen levels (dotted lines) and plasma activity (solid lines n=3) is plotted as percentile recovered from injected dose. FIG. 15B shows a table of the PK parameters calculated using Phoenix WinNonLin 6.2.1 (Pharsight, Certara) by NCA analysis including Mean Residence Time (MRT), AUC/dose and other parameters.

### Example 11: Comparison of Intravenous and Subcutaneous Administration

[0292] HemB mice were intravenously dosed with 50 IU/kg (solid line), 100 (large dashed line), or 200 IU/kg (small dashed line) of rFIXFc, and FIX plasma activity levels were measured at various times post administration up to 7 days (FIG. 16). Shaded areas represent the modeled FIX plasma activity levels for 100 and 200 IU/kg subcutaneously dosed rFIXFc-AP.72 (pJH84; SEQ ID NO: 151), which were calculated using a one compartment PK model fitting all the measured plasma activity data described in FIGS. 14A-14C. Subcutaneously-dosed rFIXFc-AP.72 reached its predicted plasma peak at approximately 1 day post dosing. The approximately 15 IU/dL and 30 IU/dL peak values for 100 IU/kg and 200 IU/kg Subcutaneously-dosed rFIXFc-AP.72, respectively, illustrate the reduced potential for overdosing by the subcutaneous dosing route. Potential risk of thrombosis is expected for greater than 150 IU/kg peak values. which are easily reached for intravenous rFIX doses over 150 IU/kg. Noteworthy, is the finding that rFIXFc-AP.72 dosed subcutaneously provides higher plasma levels at one day post dosing and through levels at weekly dosing intervals than rFIXFc administered intravenously at equivalent doses. This suggests that subcutaneous administration of rFIXFc-AP.72 may provide better protection against bleeds at six of the seven days post administration, as compared to an equivalent amount of rFIXFc administered intravenously on day 1 of a seven day cycle.

[0293] The foregoing description of the specific embodiments will so fully reveal the general nature of the disclosure that others can, by applying knowledge within the skill of the art, readily modify and/or adapt for various applications such specific embodiments, without undue experimentation, without departing from the general concept of the present disclosure. Therefore, such adaptations and modifications are intended to be within the meaning and range of equivalents of the disclosed embodiments, based on the teaching and guidance presented herein. It is to be understood that the phraseology or terminology herein is for the purpose of description and not of limitation, such that the terminology or phraseology of the present specification is to be interpreted by the skilled artisan in light of the teachings and guidance.

[0294] Other embodiments of the disclosure will be apparent to those skilled in the art from consideration of the specification and practice of the disclosure disclosed herein. It is intended that the specification and examples be considered as exemplary only, with a true scope and spirit of the disclosure being indicated by the following claims.

[0295] The present application claims benefit to U.S. Provisional Application No. 62/452,826 filed Jan. 31, 2017, which is incorporated herein by reference in its entirety.

### Embodiments

[0296] E1. A method of administering a Factor IX (FIX) fusion protein in a subject in need thereof, comprising subcutaneously administering to a subject a FIX fusion protein, wherein
[0297] (a) the FIX fusion protein comprises a FIX polypeptide and at least one XTEN, which is inserted within the FIX polypeptide at an insertion site corresponding to an amino acid selected from the group consisting of amino acid 103 of SEQ ID NO: 2, amino acid 105 of SEQ ID NO: 2, amino acid 142 of SEQ ID NO: 2, amino acid 149 of SEQ ID NO: 2, amino acid 162 of SEQ ID NO: 2, amino acid 166 of SEQ ID NO: 2, amino acid 174 of SEQ ID NO: 2, amino acid 224 of SEQ ID NO: 2, amino acid 226 of SEQ ID NO: 2, amino acid 228 of SEQ ID NO: 2, amino acid 413 of SEQ ID NO: 2, and any combination thereof, and
[0298] (b) wherein following the administration, the FIX fusion protein exhibits a plasma activity of from about 5% to about 30% in the subject.

[0299] E2. The method of E1, wherein the FIX fusion protein is administered at a dose of about 50 IU/kg to about 400 IU/kg.

[0300] E3. The method of E1 or E2, wherein the FIX fusion protein is administered at a dose of about 50 IU/kg, about 100 IU/kg, about 200 IU/kg, or about 400 IU/kg.

[0301] E4. The method of any one of E1 to E3, wherein the FIX fusion protein exhibits a plasma activity peak value of about 10% to about 30%.

[0302] E5. The method of any one of E1 to E4, wherein the FIX fusion protein exhibits a plasma activity peak value of about 10%, about 11%, about 12%, about 13%, about 14%, about 15%, about 16%, about 17%, about 18%, about 19%, about 20%, about 21%, about 22%, about 23%, about 24%, about 25%, about 26%, about 27%, about 28%, about 29%, or about 30%.

[0303] E6. The method of any one of E1 to E5, wherein the FIX fusion protein exhibits a plasma activity peak value of about 30%.

[0304] E7. The method of any one of E1 to E6, wherein the FIX fusion protein exhibits a plasma activity trough value of about 5% to about 10%.

[0305] E8. The method of any one of E1 to E7, wherein the FIX fusion protein exhibits a plasma activity trough value of about 5%, about 6%, about 7%, about 8%, about 9%, or about 10%.

[0306] E9. The method of any one of E1 to E8, wherein the FIX fusion protein exhibits a plasma activity trough value of about 5%.

[0307] E10. The method of any one of E1 to E9, wherein the FIX fusion protein exhibits a plasma activity peak value of about 30% and the FIX protein exhibits a plasma activity trough value of about 5%.

[0308] E11. The method of any one of E1 to E10, wherein the insertion site corresponds to an amino acid selected from the group consisting of amino acid 149 of SEQ ID NO: 2, amino acid 162 of SEQ ID NO: 2, amino acid 166 of SEQ ID NO: 2, amino acid 174 of SEQ ID NO: 2 and any combination thereof.

[0309] E12. The method of any one of E1 to E11, wherein the insertion site corresponds to an amino acid selected from the group consisting of amino acid 224 of SEQ ID NO: 2, amino acids 226 of SEQ ID NO: 2, amino acids 228 of SEQ ID NO: 2; amino acid 413 of SEQ ID NO: 2, and any combination thereof.

[0310] E13. The method of any one of E1 to E12, wherein the insertion site corresponds to an amino acid selected from the group consisting of amino acid 103 of SEQ ID NO: 2, amino acid 105 of SEQ ID NO: 2, and both.

[0311] E14. The method of any one of E1 to E13, wherein the insertion site corresponds to amino acid 142 of SEQ ID NO: 2.

[0312] E15. The method of any one of E1 to E14, wherein the XTEN comprises at least about 6 amino acids, at least about 12 amino acids, at least about 36 amino acids, at least about 42 amino acids, at least about 72 amino acids, at least about 144 amino acids, or at least about 288 amino acids.

[0313] E16. The method of any one of E1 to E15, wherein the XTEN comprises A42, A72, A864, A576, A288, AE144, AG864, AG576, AG288, AG144, or any combination thereof.

[0314] E17. The method of any one of E1 to E16, wherein the XTEN comprises an amino acid sequence at least about 80%, at least about 85%, at least about 90%, at least about 95%, at least about 96%, at least about 97%, at least about 98%, at least about 99%, or about 100% identical to an amino acid sequence selected from the group consisting of SEQ ID NOs: 34, 35, 36, 37, 38, 39, 40, 41, 42, 43, 44, 45, 46, 47, 48, 49, 50, 51, 52, 53, and any combination thereof.

[0315] E18. The method of E16 or E17, wherein the XTEN comprises AE72 or AE144.

[0316] E19. The method of any one of E16 to E18, wherein the XTEN comprises AE72.

[0317] E20. The method of any one of E1 to E19, which further comprises a second XTEN.

[0318] E21. The method of E20, wherein the second XTEN is inserted within the FIX polypeptide at an insertion site corresponding to an amino acid selected from the group consisting of amino acid 103 of SEQ ID NO: 2, amino acid 105 of SEQ ID NO: 2, amino acid 142 of SEQ ID NO: 2, amino acid 149 of SEQ ID NO: 2, amino acid 162 of SEQ ID NO: 2, amino acid 166 of SEQ ID NO: 2, amino acid 174 of SEQ ID NO: 2, amino acid 224 of SEQ ID NO: 2, amino acid 226 of SEQ ID NO: 2, amino acid 228 of SEQ ID NO: 2, amino acid 413 of SEQ ID NO: 2, and any combination thereof or wherein the second XTEN is fused to either the C-terminus of the FIX polypeptide or a linker fused to the C-terminus of the FIX polypeptide.

[0319] E22. The method of E20 or E21, wherein the XTEN and the second XTEN are inserted within the FIX polypeptide at an insertion site corresponding to an amino acid and/or fused to the C-terminus of the FIX polypeptide selected from the group consisting of:

[0320] i. amino acid 105 of SEQ ID NO: 2 and amino acid 166 of SEQ ID NO: 2;

[0321] ii. amino acid 105 of SEQ ID NO: 2 and amino acid 224 of SEQ ID NO: 2;

[0322] iii. amino acid 105 of SEQ ID NO: 2 and fused to the C-terminus;

[0323] iv. amino acid 166 of SEQ ID NO: 2 and amino acid 224 of SEQ ID NO: 2;

[0324] v. amino acid 166 of SEQ ID NO: 2 and fused to the C-terminus; and

[0325] vi. amino acid 224 of SEQ ID NO: 2 and fused to the C-terminus, respectively.

[0326] E23. The method of E20 or E21, wherein the XTEN is inserted within the FIX polypeptide at an insertion site corresponding to amino acid 166 of SEQ ID NO: 2, and wherein the second XTEN is fused to the C-terminus of the FIX polypeptide.

[0327] E24. The method of any one of E20 to E23, wherein the second XTEN comprises at least about 6 amino acids, at least about 12 amino acids, at least about 36 amino acids, at least about 42 amino acids, at least about 72 amino acids, at least about 144 amino acids, or at least about 288 amino acids.

[0328] E25. The method of any one of E20 to E24, wherein the second XTEN is selected from the group consisting of A42, A72, A864, A576, A288, AE144, AG864, AG576, AG288, AG144, and any combination thereof.

[0329] E26. The method of E25, wherein the second XTEN is A72 or AE144.

[0330] E27. The method of any one of E20 to E26, wherein the second XTEN comprises an amino acid sequence at least about 80%, at least about 85%, at least about 90%, at least about 95%, at least about 96%, at least about 97%, at least about 98%, at least about 99%, or about 100% identical to an amino acid sequence selected from the group consisting of SEQ ID NOs: 34, 35, 36, 37, 38, 39, 40, 41, 42, 43, 44, 45, 46, 47, 48, 49, 50, 51, 52, 53, and any combination thereof.

[0331] E28. The method of any one of E20 to E27, which further comprises a third, a fourth, a fifth, or a sixth XTEN.

[0332] E29. A method comprising a FIX polypeptide and a heterologous moiety comprising an XTEN, wherein the XTEN is fused to the C-terminus of the FIX polypeptide and comprises an amino acid sequence of longer than 42 amino acids and shorter than 144 amino acids in length.

[0333] E30. The method of E29, wherein the XTEN comprises an amino acid sequence of longer than 50, 55, 60, 65, or 70 amino acids and shorter than 140, 130, 120, 110, 100, 90, or 80 amino acids or any combination thereof.

[0334] E31. The method of E30, wherein the XTEN is 72 amino acids in length.

[0335] E32. The method of E31, wherein the XTEN is A72.

[0336] E33. The method of E29, wherein the XTEN comprises an amino acid sequence at least about 80%, at least about 85%, at least about 90%, at least about 95%, at least about 96%, at least about 97%, at least about 98%, at least about 99%, or 100% identical to SEQ ID NO: 35.

[0337] E34. The method of any one of E1 to E33, further comprising an Fc domain.

[0338] E35. The method of E34, wherein the Fc domain is fused to the FIX polypeptide or the XTEN.

[0339] E36. The method of E34 or E35, comprising a second Fc domain.

[0340] E37. The method of E36, wherein the second Fc domain is associated with the first Fc domain.

[0341] E38. The method of E36 or E37, which comprises two polypeptide chains, wherein the first polypeptide chain comprises the FIX polypeptide fused to the Fc domain, and the second polypeptide chain comprises the second Fc domain, wherein the first Fc domain and the second Fc domain are associated by a covalent bond.

[0342] E39. The method of E36 or E37, which is a single polypeptide chain comprising the FIX polypeptide, the Fc domain, the second Fc domain, and a linker which links the Fc domain and the second Fc domain.

[0343] E40. The method of E39, wherein the linker further comprises one or more intracellular processing sites.

[0344] E41. The method of E39 or E40, wherein the linker comprises (Gly₄Ser)n, wherein n is an integer selected from 1 to 100 (SEQ ID NO: 237).

[0345] E42. The method of any one of E1 to E41, comprising an amino acid sequence at least about 80%, at least about 85%, at least about 90%, at least about 95%, at least about 96%, at least about 97%, at least about 98%, at least about 99%, or about 100% identical to a sequence selected from the group consisting of SEQ ID NO: 54 to SEQ ID NO: 153 without the signal peptide and the propeptide sequence.

[0346] E43. The method of any one of E1 to E42, which has at least about 10%, at least about 20%, at least about 30%, at least about 40%, at least about 50%, at least about 60%, at least about 70%, at least about 80%, at least about 90% or 100% of the procoagulant activity of native FIX.

[0347] E44. The method of E43, wherein the procoagulant activity is measured by a chromogenic substrate assay, a one stage clotting assay, or both.

[0348] E45. The method of any one of E1 to E44, wherein the FIX polypeptide is a R338L FIX variant.

[0349] E46. The method of E45, wherein the R338L FIX variant comprises an amino acid sequence at least about 80%, at least about 85%, at least about 90%, at least about 95%, at least about 96%, at least about 97%, at least about 98%, at least about 99%, or 100% identical to SEQ ID NO: 2.

[0350] E47. The method of any one of E1 to E10, wherein the FIX fusion protein comprises a first chain and a second chain, wherein:

[0351] (a) the first chain comprises:
[0352] (i) a FIX polypeptide;
[0353] (ii) at least one XTEN, wherein the at least one XTEN is inserted within the FIX polypeptide at an insertion site corresponding to amino acid 166 of SEQ ID NO: 2, and wherein the at least one XTEN comprises an amino acid sequence having at least about 72 amino acids; and
[0354] (iii) a first Fc domain, wherein the first Fc domain is fused to the FIX polypeptide of the at least one XTEN; and

[0355] (b) the second chain comprises a second Fc domain;

wherein the first Fc domain and the second Fc domain are associated by a covalent bond.

[0356] E48. The method of E47, wherein the at least one XTEN comprises an amino acid sequence at least about 80%, at least about 85%, at least about 90%, at least about 95%, at least about 96%, at least about 97%, at least about 98%, at least about 99%, or about 100% identical to the amino acid sequence of SEQ ID NO: 35.

[0357] E49. The method of E47 or E48, wherein the first chain of the FIX fusion protein comprises an amino acid sequence at least about 80%, at least about 85%, at least about 90%, at least about 95%, at least about 96%, at least about 97%, at least about 98%, or at least about 99% identical to the amino acid sequence of SEQ ID NO: 227; and wherein the second chain of the FIX fusion protein comprises an amino acid sequence at least about 80%, at least about 85%, at least about 90%, at least about 95%, at least about 96%, at least about 97%, at least about 98%, or at least about 99% identical to the amino acid sequence of SEQ ID NO: 228.

[0358] E50. The FIX fusion protein of any one of E47 to E49, wherein the first chain of the FIX fusion protein comprises an amino acid sequence of SEQ ID NO: 227; and wherein the second chain of the FIX fusion protein comprises an amino acid sequence of SEQ ID NO: 228.

[0359] The following vector sequences are referenced in the proceeding examples and elsewhere in the present application. The following key will aid in understanding the information:

Key:
Signal peptide (pre-peptide)
Pro-peptide

[chemical structure]

[chemical structure]

Insertion or fusion of XTEN and/or Fc
SEQ ID NO: 54 E0113_AE42; PNL118
MQRVNMIMAESPGLITICLLGYLLSAECTVFLDHENANKILNRPKRYNSGKLEEFVQGNLERECM
EEKCSFEEAREVFENTERTTEFWKQYVDGDQCESNPCLNGGSCKDDINSYECWCPFGFEGKNCEL
DVTCNIKNGRCEQFCKNSADNKVVCSCTEGAPGSPAGSPTSTEEGTSESATPESGPGSEPATSGS
ETPASSGYRLAENQKSCEPAVPFPCGRVSVSQTSKLTRAETVFPDVDYVNSTEAETILDNITQST
QSFNDFTRVVGGEDAKPGQFPWQVVLNGKVDAFCGGSIVNEKWIVTAAHCVETGVKITVVAGEHN
IEETEHTEQKRNVIRIIPHHNYNAAINKYNHDIALLELDEPLVLNSYVTPICIADKEYTNIFLKF
GSGYVSGWGRVFHKGRSALVLQYLRVPLVDRATCLLSTKFTIYNNMFCAGFHEGGRDSCQGDSGG

[chemical structure]

[chemical structure]

SEQ ID NO: 55 N0089_AE42 pNL116
MQRVNMIMAESPGLITICLLGYLLSAECTVFLDHENANKILNRPKRYNSGKLEEFVQGNLERECM
EEKCSFEEAREVFENTERTTEFWKQYVDGDQCESNPCLNGGSCKDDINSYECWCPFGFEGKNCEL
DVTCNGAPGSPAGSPTSTEEGTSESATPESGPGSEPATSGSETPASSIKNGRCEQFCKNSADNKV
VCSCTEGYRLAENQKSCEPAVPFPCGRVSVSQTSKLTRAETVFPDVDYVNSTEAETILDNITQST
QSFNDFTRVVGGEDAKPGQFPWQVVLNGKVDAFCGGSIVNEKWIVTAAHCVETGVKITVVAGEHN
IEETEHTEQKRNVIRIIPHHNYNAAINKYNHDIALLELDEPLVLNSYVTPICIADKEYTNIFLKF
GSGYVSGWGRVFHKGRSALVLQYLRVPLVDRATCLLSTKFTIYNNMFCAGFHEGGRDSCQGDSGG

[chemical structure]

[chemical structure]

SEQ ID NO: 56 A0103_AE42 pNL117
MQRVNMIMAESPGLITICLLGYLLSAECTVFLDHENANKILNRPKRYNSGKLEEFVQGNLERECM
EEKCSFEEAREVFENTERTTEFWKQYVDGDQCESNPCLNGGSCKDDINSYECWCPFGFEGKNCEL
DVTCNIKNGRCEQFCKNSAGAPGSPAGSPTSTEEGTSESATPESGPGSEPATSGSETPASSDNKV
VCSCTEGYRLAENQKSCEPAVPFPCGRVSVSQTSKLTRAETVFPDVDYVNSTEAETILDNITQST
QSFNDFTRVVGGEDAKPGQFPWQVVLNGKVDAFCGGSIVNEKWIVTAAHCVETGVKITVVAGEHN
IEETEHTEQKRNVIRIIPHHNYNAAINKYNHDIALLELDEPLVLNSYVTPICIADKEYTNIFLKF
GSGYVSGWGRVFHKGRSALVLQYLRVPLVDRATCLLSTKFTIYNNMFCAGFHEGGRDSCQGDSGG

[chemical structure]

[chemical structure]

SEQ ID NO: 57 P0129_AE42 pNL119
MQRVNMIMAESPGLITICLLGYLLSAECTVFLDHENANKILNRPKRYNSGKLEEFVQGNLERECM
EEKCSFEEAREVFENTERTTEFWKQYVDGDQCESNPCLNGGSCKDDINSYECWCPFGFEGKNCEL
DVTCNIKNGRCEQFCKNSADNKVVCSCTEGYRLAENQKSCEPAVPGAPGSPAGSPTSTEEGTSES
ATPESGPGSEPATSGSETPASSFPCGRVSVSQTSKLTRAETVFPDVDYVNSTEAETILDNITQST
QSFNDFTRVVGGEDAKPGQFPWQVVLNGKVDAFCGGSIVNEKWIVTAAHCVETGVKITVVAGEHN
IEETEHTEQKRNVIRIIPHHNYNAAINKYNHDIALLELDEPLVLNSYVTPICIADKEYTNIFLKF
GSGYVSGWGRVFHKGRSALVLQYLRVPLVDRATCLLSTKFTIYNNMFCAGFHEGGRDSCQGDSGG

[chemical structure]

[chemical structure]

SEQ ID NO: 58 K0142_AE42 pNL120
MQRVNMIMAESPGLITICLLGYLLSAECTVFLDHENANKILNRPKRYNSGKLEEFVQGNLERECM
EEKCSFEEAREVFENTERTTEFWKQYVDGDQCESNPCLNGGSCKDDINSYECWCPFGFEGKNCEL
DVTCNIKNGRCEQFCKNSADNKVVCSCTEGYRLAENQKSCEPAVPFPCGRVSVSQTSKGAPGSPA
GSPTSTEEGTSESATPESGPGSEPATSGSETPASSLTRAETVFPDVDYVNSTEAETILDNITQST
QSFNDFTRVVGGEDAKPGQFPWQVVLNGKVDAFCGGSIVNEKWIVTAAHCVETGVKITVVAGEHN
IEETEHTEQKRNVIRIIPHHNYNAAINKYNHDIALLELDEPLVLNSYVTPICIADKEYTNIFLKF
GSGYVSGWGRVFHKGRSALVLQYLRVPLVDRATCLLSTKFTIYNNMFCAGFHEGGRDSCQGDSGG

[chemical structure]

[chemical structure]

SEQ ID NO: 59 V0149_AE42 pNL121
MQRVNMIMAESPGLITICLLGYLLSAECTVFLDHENANKILNRPKRYNSGKLEEFVQGNLERECM
EEKCSFEEAREVFENTERTTEFWKQYVDGDQCESNPCLNGGSCKDDINSYECWCPFGFEGKNCEL
DVTCNIKNGRCEQFCKNSADNKVVCSCTEGYRLAENQKSCEPAVPFPCGRVSVSQTSKLTRAETV
GAPGSPAGSPTSTEEGTSESATPESGPGSEPATSGSETPASSFPDVDYVNSTEAETILDNITQST
QSFNDFTRVVGGEDAKPGQFPWQVVLNGKVDAFCGGSIVNEKWIVTAAHCVETGVKITVVAGEHN
IEETEHTEQKRNVIRIIPHHNYNAAINKYNHDIALLELDEPLVLNSYVTPICIADKEYTNIFLKF
GSGYVSGWGRVFHKGRSALVLQYLRVPLVDRATCLLSTKFTIYNNMFCAGFHEGGRDSCQGDSGG

[chemical structure]

[chemical structure]

SEQ ID NO: 60 E0162_AE42 pNL122
MQRVNMIMAESPGLITICLLGYLLSAECTVFLDHENANKILNRPKRYNSGKLEEFVQGNLERECM
EEKCSFEEAREVFENTERTTEFWKQYVDGDQCESNPCLNGGSCKDDINSYECWCPFGFEGKNCEL
DVTCNIKNGRCEQFCKNSADNKVVCSCTEGYRLAENQKSCEPAVPFPCGRVSVSQTSKLTRAETV
FPDVDYVNSTEAEGAPGSPAGSPTSTEEGTSESATPESGPGSEPATSGSETPASSTILDNITQST
QSFNDFTRVVGGEDAKPGQFPWQVVLNGKVDAFCGGSIVNEKWIVTAAHCVETGVKITVVAGEHN
IEETEHTEQKRNVIRIIPHHNYNAAINKYNHDIALLELDEPLVLNSYVTPICIADKEYTNIFLKF
GSGYVSGWGRVFHKGRSALVLQYLRVPLVDRATCLLSTKFTIYNNMFCAGFHEGGRDSCQGDSGG

[chemical structure]

[chemical structure]

SEQ ID NO: 61 D0166_AE42 pNL123
MQRVNMIMAESPGLITICLLGYLLSAECTVFLDHENANKILNRPKRYNSGKLEEFVQGNLERECM
EEKCSFEEAREVFENTERTTEFWKQYVDGDQCESNPCLNGGSCKDDINSYECWCPFGFEGKNCEL
DVTCNIKNGRCEQFCKNSADNKVVCSCTEGYRLAENQKSCEPAVPFPCGRVSVSQTSKLTRAETV
FPDVDYVNSTEAETILDGAPGSPAGSPTSTEEGTSESATPESGPGSEPATSGSETPASSNITQST
QSFNDFTRVVGGEDAKPGQFPWQVVLNGKVDAFCGGSIVNEKWIVTAAHCVETGVKITVVAGEHN
IEETEHTEQKRNVIRIIPHHNYNAAINKYNHDIALLELDEPLVLNSYVTPICIADKEYTNIFLKF
GSGYVSGWGRVFHKGRSALVLQYLRVPLVDRATCLLSTKFTIYNNMFCAGFHEGGRDSCQGDSGG

[chemical structure]

[chemical structure]

SEQ ID NO: 62 S0174_AE42 pNL124
MQRVNMIMAESPGLITICLLGYLLSAECTVFLDHENANKILNRPKRYNSGKLEEFVQGNLERECM
EEKCSFEEAREVFENTERTTEFWKQYVDGDQCESNPCLNGGSCKDDINSYECWCPFGFEGKNCEL
DVTCNIKNGRCEQFCKNSADNKVVCSCTEGYRLAENQKSCEPAVPFPCGRVSVSQTSKLTRAETV
FPDVDYVNSTEAETILDNITQSTQSGAPGSPAGSPTSTEEGTSESATPESGPGSEPATSGSETPA
SSFNDFTRVVGGEDAKPGQFPWQVVLNGKVDAFCGGSIVNEKWIVTAAHCVETGVKITVVAGEHN
IEETEHTEQKRNVIRIIPHHNYNAAINKYNHDIALLELDEPLVLNSYVTPICIADKEYTNIFLKF
GSGYVSGWGRVFHKGRSALVLQYLRVPLVDRATCLLSTKFTIYNNMFCAGFHEGGRDSCQGDSGG

[chemical structure]

[chemical structure]

SEQ ID NO: 63 K0188_AE42 pNL125
MQRVNMIMAESPGLITICLLGYLLSAECTVFLDHENANKILNRPKRYNSGKLEEFVQGNLERECM
EEKCSFEEAREVFENTERTTEFWKQYVDGDQCESNPCLNGGSCKDDINSYECWCPFGFEGKNCEL
DVTCNIKNGRCEQFCKNSADNKVVCSCTEGYRLAENQKSCEPAVPFPCGRVSVSQTSKLTRAETV
FPDVDYVNSTEAETILDNITQSTQSFNDFIRVVGGEDAKGAPGSPAGSPTSTEEGTSESATPESG
PGSEPATSGSETPASSPGQFPWQVVLNGKVDAFCGGSIVNEKWIVTAAHCVETGVKITVVAGEHN
IEETEHTEQKRNVIRIIPHHNYNAAINKYNHDIALLELDEPLVLNSYVTPICIADKEYTNIFLKF
GSGYVSGWGRVFHKGRSALVLQYLRVPLVDRATCLLSTKFTIYNNMFCAGFHEGGRDSCQGDSGG

[chemical structure]

[chemical structure]

SEQ ID NO: 64 V0202_AE42 pNL126
MQRVNMIMAESPGLITICLLGYLLSAECTVFLDHENANKILNRPKRYNSGKLEEFVQGNLERECM
EEKCSFEEAREVFENTERTTEFWKQYVDGDQCESNPCLNGGSCKDDINSYECWCPFGFEGKNCEL
DVTCNIKNGRCEQFCKNSADNKVVCSCTEGYRLAENQKSCEPAVPFPCGRVSVSQTSKLTRAETV
FPDVDYVNSTEAETILDNITQSTQSFNDFIRVVGGEDAKPGQFPWQVVLNGKVGAPGSPAGSPTS
TEEGTSESATPESGPGSEPATSGSETPASSDAFCGGSIVNEKWIVTAAHCVETGVKITVVAGEHN
IEETEHTEQKRNVIRIIPHHNYNAAINKYNHDIALLELDEPLVLNSYVTPICIADKEYTNIFLKF
GSGYVSGWGRVFHKGRSALVLQYLRVPLVDRATCLLSTKFTIYNNMFCAGFHEGGRDSCQGDSGG

[chemical structure]

[chemical structure]

SEQ ID NO: 65 E0224_AE42 pNL127
MQRVNMIMAESPGLITICLLGYLLSAECTVFLDHENANKILNRPKRYNSGKLEEFVQGNLERECM
EEKCSFEEAREVFENTERTTEFWKQYVDGDQCESNPCLNGGSCKDDINSYECWCPFGFEGKNCEL
DVTCNIKNGRCEQFCKNSADNKVVCSCTEGYRLAENQKSCEPAVPFPCGRVSVSQTSKLTRAETV
FPDVDYVNSTEAETILDNITQSTQSFNDFTRVVGGEDAKPGQFPWQVVLNGKVDAFCGGSIVNEK
WIVTAAHCVEGAPGSPAGSPTSTEEGTSESATPESGPGSEPATSGSETPASSIGVKITVVAGEHN
IEETEHTEQKRNVIRIIPHHNYNAAINKYNHDIALLELDEPLVLNSYVTPICIADKEYTNIFLKF
GSGYVSGWGRVFHKGRSALVLQYLRVPLVDRATCLLSTKFTIYNNMFCAGFHEGGRDSCQGDSGG

[chemical structure]

[chemical structure]

SEQ ID NO: 66 E0240_AE42 pNL128
MQRVNMIMAESPGLITICLLGYLLSAECTVFLDHENANKILNRPKRYNSGKLEEFVQGNLERECM
EEKCSFEEAREVFENTERTTEFWKQYVDGDQCESNPCLNGGSCKDDINSYECWCPFGFEGKNCEL
DVTCNIKNGRCEQFCKNSADNKVVCSCTEGYRLAENQKSCEPAVPFPCGRVSVSQTSKLTRAETV
FPDVDYVNSTEAETILDNITQSTQSFNDFTRVVGGEDAKPGQFPWQVVLNGKVDAFCGGSIVNEK
WIVTAAHCVETGVKITVVAGEHNIEEGAPGSPAGSPTSTEEGTSESATPESGPGSEPATSGSETP
ASSTEHTEQKRNVIRIIPHHNYNAAINKYNHDIALLELDEPLVLNSYVTPICIADKEYTNIFLKF
GSGYVSGWGRVFHKGRSALVLQYLRVPLVDRATCLLSTKFTIYNNMFCAGFHEGGRDSCQGDSGG

[chemical structure]

[chemical structure]

SEQ ID NO: 67 H0257_AE42 pNL129
MQRVNMIMAESPGLITICLLGYLLSAECTVFLDHENANKILNRPKRYNSGKLEEFVQGNLERECM
EEKCSFEEAREVFENTERTTEFWKQYVDGDQCESNPCLNGGSCKDDINSYECWCPFGFEGKNCEL
DVTCNIKNGRCEQFCKNSADNKVVCSCTEGYRLAENQKSCEPAVPFPCGRVSVSQTSKLTRAETV
FPDVDYVNSTEAETILDNITQSTQSFNDFTRVVGGEDAKPGQFPWQVVLNGKVDAFCGGSIVNEK
WIVTAAHCVETGVKITVVAGEHNIEETEHTEQKRNVIRIIPHHGAPGSPAGSPTSTEEGTSESAT
PESGPGSEPATSGSETPASSNYNAAINKYNHDIALLELDEPLVLNSYVTPICIADKEYTNIFLKF
GSGYVSGWGRVFHKGRSALVLQYLRVPLVDRATCLLSTKFTIYNNMFCAGFHEGGRDSCQGDSGG

[chemical structure]

[chemical structure]

SEQ ID NO: 68 K0265_AE42 pNL130
MQRVNMIMAESPGLITICLLGYLLSAECTVFLDHENANKILNRPKRYNSGKLEEFVQGNLERECM
EEKCSFEEAREVFENTERTTEFWKQYVDGDQCESNPCLNGGSCKDDINSYECWCPFGFEGKNCEL
DVTCNIKNGRCEQFCKNSADNKVVCSCTEGYRLAENQKSCEPAVPFPCGRVSVSQTSKLTRAETV
FPDVDYVNSTEAETILDNITQSTQSFNDFTRVVGGEDAKPGQFPWQVVLNGKVDAFCGGSIVNEK
WIVTAAHCVETGVKITVVAGEHNIEETEHTEQKRNVIRIIPHHNYNAAINKGAPGSPAGSPTSTE
EGTSESATPESGPGSEPATSGSETPASSYNHDIALLELDEPLVLNSYVTPICIADKEYTNIFLKF
GSGYVSGWGRVFHKGRSALVLQYLRVPLVDRATCLLSTKFTIYNNMFCAGFHEGGRDSCQGDSGG

[chemical structure]

[chemical structure]

SEQ ID NO: 69 E0277_AE42 pNL131
MQRVNMIMAESPGLITICLLGYLLSAECTVFLDHENANKILNRPKRYNSGKLEEFVQGNLERECM
EEKCSFEEAREVFENTERTTEFWKQYVDGDQCESNPCLNGGSCKDDINSYECWCPFGFEGKNCEL
DVTCNIKNGRCEQFCKNSADNKVVCSCTEGYRLAENQKSCEPAVPFPCGRVSVSQTSKLTRAETV
FPDVDYVNSTEAETILDNITQSTQSFNDFTRVVGGEDAKPGQFPWQVVLNGKVDAFCGGSIVNEK
WIVTAAHCVETGVKITVVAGEHNIEETEHTEQKRNVIRIIPHHNYNAAINKYNHDIALLELDEGA
PGSPAGSPTSTEEGTSESATPESGPGSEPATSGSETPASSPLVLNSYVTPICIADKEYTNIFLKF
GSGYVSGWGRVFHKGRSALVLQYLRVPLVDRATCLLSTKFTIYNNMFCAGFHEGGRDSCQGDSGG

[chemical structure]

[chemical structure]

SEQ ID NO: 70 D0292_AE42 pNL132
MQRVNMIMAESPGLITICLLGYLLSAECTVFLDHENANKILNRPKRYNSGKLEEFVQGNLERECM
EEKCSFEEAREVFENTERTTEFWKQYVDGDQCESNPCLNGGSCKDDINSYECWCPFGFEGKNCEL
DVTCNIKNGRCEQFCKNSADNKVVCSCTEGYRLAENQKSCEPAVPFPCGRVSVSQTSKLTRAETV
FPDVDYVNSTEAETILDNITQSTQSFNDFTRVVGGEDAKPGQFPWQVVLNGKVDAFCGGSIVNEK
WIVTAAHCVETGVKITVVAGEHNIEETEHTEQKRNVIRIIPHHNYNAAINKYNHDIALLELDEPL
VLNSYVTPICIADGAPGSPAGSPTSTEEGTSESATPESGPGSEPATSGSETPASSKEYTNIFLKF
GSGYVSGWGRVFHKGRSALVLQYLRVPLVDRATCLLSTKFTIYNNMFCAGFHEGGRDSCQGDSGG

[chemical structure]

[chemical structure]

SEQ ID NO: 71 K0316_AE42 pNL133
MQRVNMIMAESPGLITICLLGYLLSAECTVFLDHENANKILNRPKRYNSGKLEEFVQGNLERECM
EEKCSFEEAREVFENTERTTEFWKQYVDGDQCESNPCLNGGSCKDDINSYECWCPFGFEGKNCEL
DVTCNIKNGRCEQFCKNSADNKVVCSCTEGYRLAENQKSCEPAVPFPCGRVSVSQTSKLTRAETV
FPDVDYVNSTEAETILDNITQSTQSFNDFTRVVGGEDAKPGQFPWQVVLNGKVDAFCGGSIVNEK
WIVTAAHCVETGVKITVVAGEHNIEETEHTEQKRNVIRIIPHHNYNAAINKYNHDIALLELDEPL
VLNSYVTPICIADKEYTNIFLKFGSGYVSGWGRVFHKGAPGSPAGSPTSTEEGTSESATPESGPG
SEPATSGSETPASSGRSALVLQYLRVPLVDRATCLLSTKFTIYNNMFCAGFHEGGRDSCQGDSGG

[chemical structure]

[chemical structure]

SEQ ID NO: 72 K0341_AE42 pNL134
MQRVNMIMAESPGLITICLLGYLLSAECTVFLDHENANKILNRPKRYNSGKLEEFVQGNLERECM
EEKCSFEEAREVFENTERTTEFWKQYVDGDQCESNPCLNGGSCKDDINSYECWCPFGFEGKNCEL
DVTCNIKNGRCEQFCKNSADNKVVCSCTEGYRLAENQKSCEPAVPFPCGRVSVSQTSKLTRAETV
FPDVDYVNSTEAETILDNITQSTQSFNDFTRVVGGEDAKPGQFPWQVVLNGKVDAFCGGSIVNEK
WIVTAAHCVETGVKITVVAGEHNIEETEHTEQKRNVIRIIPHHNYNAAINKYNHDIALLELDEPL
VLNSYVTPICIADKEYTNIFLKFGSGYVSGWGRVFHKGRSALVLQYLRVPLVDRATCLLSTKGAP
GSPAGSPTSTEEGTSESATPESGPGSEPATSGSETPASSFTIYNNMFCAGFHEGGRDSCQGDSGG

[chemical structure]

[chemical structure]

SEQ ID NO: 73 H0354_AE42 pNL135
MQRVNMIMAESPGLITICLLGYLLSAECTVFLDHENANKILNRPKRYNSGKLEEFVQGNLERECM
EEKCSFEEAREVFENTERTTEFWKQYVDGDQCESNPCLNGGSCKDDINSYECWCPFGFEGKNCEL
DVTCNIKNGRCEQFCKNSADNKVVCSCTEGYRLAENQKSCEPAVPFPCGRVSVSQTSKLTRAETV
FPDVDYVNSTEAETILDNITQSTQSFNDFTRVVGGEDAKPGQFPWQVVLNGKVDAFCGGSIVNEK
WIVTAAHCVETGVKITVVAGEHNIEETEHTEQKRNVIRIIPHHNYNAAINKYNHDIALLELDEPL
VLNSYVTPICIADKEYTNIFLKFGSGYVSGWGRVFHKGRSALVLQYLRVPLVDRATCLLSTKFTI
YNNMFCAGFHGAPGSPAGSPTSTEEGTSESATPESGPGSEPATSGSETPASSEGGRDSCQGDSGG

[chemical structure]

[chemical structure]

SEQ ID NO: 74 K0392_AE42 pNL136
MQRVNMIMAESPGLITICLLGYLLSAECTVFLDHENANKILNRPKRYNSGKLEEFVQGNLERECM
EEKCSFEEAREVFENTERTTEFWKQYVDGDQCESNPCLNGGSCKDDINSYECWCPFGFEGKNCEL
DVTCNIKNGRCEQFCKNSADNKVVCSCTEGYRLAENQKSCEPAVPFPCGRVSVSQTSKLTRAETV
FPDVDYVNSTEAETILDNITQSTQSFNDFTRVVGGEDAKPGQFPWQVVLNGKVDAFCGGSIVNEK
WIVTAAHCVETGVKITVVAGEHNIEETEHTEQKRNVIRIIPHHNYNAAINKYNHDIALLELDEPL
VLNSYVTPICIADKEYTNIFLKFGSGYVSGWGRVFHKGRSALVLQYLRVPLVDRATCLLSTKFTI
YNNMFCAGFHEGGRDSCQGDSGGPHVTEVEGTSFLTGIISWGEECAMKGAPGSPAGSPTSTEEGT

[chemical structure]

[chemical structure]

SEQ ID NO: 75 R0403_AE42 pNL137
MQRVNMIMAESPGLITICLLGYLLSAECTVFLDHENANKILNRPKRYNSGKLEEFVQGNLERECM
EEKCSFEEAREVFENTERTTEFWKQYVDGDQCESNPCLNGGSCKDDINSYECWCPFGFEGKNCEL
DVTCNIKNGRCEQFCKNSADNKVVCSCTEGYRLAENQKSCEPAVPFPCGRVSVSQTSKLTRAETV
FPDVDYVNSTEAETILDNITQSTQSFNDFTRVVGGEDAKPGQFPWQVVLNGKVDAFCGGSIVNEK
WIVTAAHCVETGVKITVVAGEHNIEETEHTEQKRNVIRIIPHHNYNAAINKYNHDIALLELDEPL
VLNSYVTPICIADKEYTNIFLKFGSGYVSGWGRVFHKGRSALVLQYLRVPLVDRATCLLSTKFTI
YNNMFCAGFHEGGRDSCQGDSGGPHVTEVEGTSFLTGIISWGEECAMKGKYGIYTKVSRGAPGSP

[chemical structure]

[chemical structure]

SEQ ID NO: 76 K0413_AE42 pNL138
MQRVNMIMAESPGLITICLLGYLLSAECTVFLDHENANKILNRPKRYNSGKLEEFVQGNLERECM
EEKCSFEEAREVFENTERTTEFWKQYVDGDQCESNPCLNGGSCKDDINSYECWCPFGFEGKNCEL
DVTCNIKNGRCEQFCKNSADNKVVCSCTEGYRLAENQKSCEPAVPFPCGRVSVSQTSKLTRAETV
FPDVDYVNSTEAETILDNITQSTQSFNDFTRVVGGEDAKPGQFPWQVVLNGKVDAFCGGSIVNEK
WIVTAAHCVETGVKITVVAGEHNIEETEHTEQKRNVIRIIPHHNYNAAINKYNHDIALLELDEPL
VLNSYVTPICIADKEYTNIFLKFGSGYVSGWGRVFHKGRSALVLQYLRVPLVDRATCLLSTKFTI
YNNMFCAGFHEGGRDSCQGDSGGPHVTEVEGTSFLTGIISWGEECAMKGKYGIYTKVSRYVNWIK

[chemical structure]

[chemical structure]

SEQ ID NO: 77 CT_AE42 pNL140
MQRVNMIMAESPGLITICLLGYLLSAECTVFLDHENANKILNRPKRYNSGKLEEFVQGNLERECM
EEKCSFEEAREVFENTERTTEFWKQYVDGDQCESNPCLNGGSCKDDINSYECWCPFGFEGKNCEL
DVTCNIKNGRCEQFCKNSADNKVVCSCTEGYRLAENQKSCEPAVPFPCGRVSVSQTSKLTRAETV
FPDVDYVNSTEAETILDNITQSTQSFNDFTRVVGGEDAKPGQFPWQVVLNGKVDAFCGGSIVNEK
WIVTAAHCVETGVKITVVAGEHNIEETEHTEQKRNVIRIIPHHNYNAAINKYNHDIALLELDEPL
VLNSYVTPICIADKEYTNIFLKFGSGYVSGWGRVFHKGRSALVLQYLRVPLVDRATCLLSTKFTI
YNNMFCAGFHEGGRDSCQGDSGGPHVTEVEGTSFLTGIISWGEECAMKGKYGIYTKVSRYVNWIK

[chemical structure]

[chemical structure]

SEQ ID NO: 78 E0052_AE42 pNL141
MQRVNMIMAESPGLITICLLGYLLSAECTVFLDHENANKILNRPKRYNSGKLEEFVQGNLERECM
EEKCSFEEAREVFENTERTTEFWKQYVDGDQCEGAPGSPAGSPTSTEEGTSESATPESGPGSEPA
TSGSETPASSSNPCLNGGSCKDDINSYECWCPFGFEGKNCELDVTCNIKNGRCEQFCKNSADNKV
VCSCTEGYRLAENQKSCEPAVPFPCGRVSVSQTSKLTRAETVFPDVDYVNSTEAETILDNITQST
QSFNDFTRVVGGEDAKPGQFPWQVVLNGKVDAFCGGSIVNEKWIVTAAHCVETGVKITVVAGEHN
IEETEHTEQKRNVIRIIPHHNYNAAINKYNHDIALLELDEPLVLNSYVTPICIADKEYTNIFLKF
GSGYVSGWGRVFHKGRSALVLQYLRVPLVDRATCLLSTKFTIYNNMFCAGFHEGGRDSCQGDSGG

[chemical structure]

[chemical structure]

SEQ ID NO: 79 G0059_AE42 pNL142
MQRVNMIMAESPGLITICLLGYLLSAECTVFLDHENANKILNRPKRYNSGKLEEFVQGNLERECM
EEKCSFEEAREVFENTERTTEFWKQYVDGDQCESNPCLNGGAPGSPAGSPTSTEEGTSESATPES
GPGSEPATSGSETPASSGSCKDDINSYECWCPFGFEGKNCELDVTCNIKNGRCEQFCKNSADNKV
VCSCTEGYRLAENQKSCEPAVPFPCGRVSVSQTSKLTRAETVFPDVDYVNSTEAETILDNITQST
QSFNDFTRVVGGEDAKPGQFPWQVVLNGKVDAFCGGSIVNEKWIVTAAHCVETGVKITVVAGEHN
IEETEHTEQKRNVIRIIPHHNYNAAINKYNHDIALLELDEPLVLNSYVTPICIADKEYTNIFLKF
GSGYVSGWGRVFHKGRSALVLQYLRVPLVDRATCLLSTKFTIYNNMFCAGFHEGGRDSCQGDSGG

[chemical structure]

[chemical structure]

SEQ ID NO: 80 I0066_AE42 pNL143
MQRVNMIMAESPGLITICLLGYLLSAECTVFLDHENANKILNRPKRYNSGKLEEFVQGNLERECM
EEKCSFEEAREVFENTERTTEFWKQYVDGDQCESNPCLNGGSCKDDIGAPGSPAGSPTSTEEGTS
ESATPESGPGSEPATSGSETPASSNSYECWCPFGFEGKNCELDVTCNIKNGRCEQFCKNSADNKV
VCSCTEGYRLAENQKSCEPAVPFPCGRVSVSQTSKLTRAETVFPDVDYVNSTEAETILDNITQST
QSFNDFTRVVGGEDAKPGQFPWQVVLNGKVDAFCGGSIVNEKWIVTAAHCVETGVKITVVAGEHN
IEETEHTEQKRNVIRIIPHHNYNAAINKYNHDIALLELDEPLVLNSYVTPICIADKEYTNIFLKF
GSGYVSGWGRVFHKGRSALVLQYLRVPLVDRATCLLSTKFTIYNNMFCAGFHEGGRDSCQGDSGG

[chemical structure]

[chemical structure]

SEQ ID NO: 81 K0080_AE42 pNL144
MQRVNMIMAESPGLITICLLGYLLSAECTVFLDHENANKILNRPKRYNSGKLEEFVQGNLERECM
EEKCSFEEAREVFENTERTTEFWKQYVDGDQCESNPCLNGGSCKDDINSYECWCPFGFEGKGAPG
SPAGSPTSTEEGTSESATPESGPGSEPATSGSETPASSNCELDVTCNIKNGRCEQFCKNSADNKV
VCSCTEGYRLAENQKSCEPAVPFPCGRVSVSQTSKLTRAETVFPDVDYVNSTEAETILDNITQST
QSFNDFTRVVGGEDAKPGQFPWQVVLNGKVDAFCGGSIVNEKWIVTAAHCVETGVKITVVAGEHN
IEETEHTEQKRNVIRIIPHHNYNAAINKYNHDIALLELDEPLVLNSYVTPICIADKEYTNIFLKF
GSGYVSGWGRVFHKGRSALVLQYLRVPLVDRATCLLSTKFTIYNNMFCAGFHEGGRDSCQGDSGG

[chemical structure]

[chemical structure]

SEQ ID NO: 82 D0085_AE42 pNL145
MQRVNMIMAESPGLITICLLGYLLSAECTVFLDHENANKILNRPKRYNSGKLEEFVQGNLERECM
EEKCSFEEAREVFENTERTTEFWKQYVDGDQCESNPCLNGGSCKDDINSYECWCPFGFEGKNCEL
DGAPGSPAGSPTSTEEGTSESATPESGPGSEPATSGSETPASSVTCNIKNGRCEQFCKNSADNKV
VCSCTEGYRLAENQKSCEPAVPFPCGRVSVSQTSKLTRAETVFPDVDYVNSTEAETILDNITQST
QSFNDFTRVVGGEDAKPGQFPWQVVLNGKVDAFCGGSIVNEKWIVTAAHCVETGVKITVVAGEHN
IEETEHTEQKRNVIRIIPHHNYNAAINKYNHDIALLELDEPLVLNSYVTPICIADKEYTNIFLKF
GSGYVSGWGRVFHKGRSALVLQYLRVPLVDRATCLLSTKFTIYNNMFCAGFHEGGRDSCQGDSGG

[chemical structure]

[chemical structure]

SEQ ID NO: 83 CT_AE144 pNL164
MQRVNMIMAESPGLITICLLGYLLSAECTVFLDHENANKILNRPKRYNSGKLEEFVQGNLERECM
EEKCSFEEAREVFENTERTTEFWKQYVDGDQCESNPCLNGGSCKDDINSYECWCPFGFEGKNCEL
DVTCNIKNGRCEQFCKNSADNKVVCSCTEGYRLAENQKSCEPAVPFPCGRVSVSQTSKLTRAETV
FPDVDYVNSTEAETILDNITQSTQSFNDFTRVVGGEDAKPGQFPWQVVLNGKVDAFCGGSIVNEK
WIVTAAHCVETGVKITVVAGEHNIEETEHTEQKRNVIRIIPHHNYNAAINKYNHDIALLELDEPL
VLNSYVTPICIADKEYTNIFLKFGSGYVSGWGRVFHKGRSALVLQYLRVPLVDRATCLLSTKFTI
YNNMFCAGFHEGGRDSCQGDSGGPHVTEVEGTSFLTGIISWGEECAMKGKYGIYTKVSRYVNWIK

[chemical structure]

TSESATPESGPGTSESATPESGPGTSESATPESGPGSEPATSGSETPGSEPATSGSETPGSPAGS
PTSTEEGTSTEPSEGSAPGTSTEPSEGSAPGSEPATSGSETPGTSESATPESGPGTSTEPSEGSA

[chemical structure]

SEQ ID NO: 84 CT_AE288 pNL165
MQRVNMIMAESPGLITICLLGYLLSAECTVFLDHENANKILNRPKRYNSGKLEEFVQGNLERECM
EEKCSFEEAREVFENTERTTEFWKQYVDGDQCESNPCLNGGSCKDDINSYECWCPFGFEGKNCEL
DVTCNIKNGRCEQFCKNSADNKVVCSCTEGYRLAENQKSCEPAVPFPCGRVSVSQTSKLTRAETV
FPDVDYVNSTEAETILDNITQSTQSFNDFTRVVGGEDAKPGQFPWQVVLNGKVDAFCGGSIVNEK
WIVTAAHCVETGVKITVVAGEHNIEETEHTEQKRNVIRIIPHHNYNAAINKYNHDIALLELDEPL
VLNSYVTPICIADKEYTNIFLKFGSGYVSGWGRVFHKGRSALVLQYLRVPLVDRATCLLSTKFTI
YNNMFCAGFHEGGRDSCQGDSGGPHVTEVEGTSFLTGIISWGEECAMKGKYGIYTKVSRYVNWIK

[chemical structure]

GSEPATSGSETPGTSESATPESGPGSEPATSGSETPGTSESATPESGPGTSTEPSEGSAPGSPAG
SPTSTEEGTSESATPESGPGSEPATSGSETPGTSESATPESGPGSPAGSPTSTEEGSPAGSPTST
EEGTSTEPSEGSAPGTSESATPESGPGTSESATPESGPGTSESATPESGPGSEPATSGSETPGSE
PATSGSETPGSPAGSPTSTEEGTSTEPSEGSAPGTSTEPSEGSAPGSEPATSGSETPGTSESATP

[chemical structure]

SEQ ID NO: 85 CT_AE864 pNL166
MQRVNMIMAESPGLITICLLGYLLSAECTVFLDHENANKILNRPKRYNSGKLEEFVQGNLERECM
EEKCSFEEAREVFENTERTTEFWKQYVDGDQCESNPCLNGGSCKDDINSYECWCPFGFEGKNCEL
DVTCNIKNGRCEQFCKNSADNKVVCSCTEGYRLAENQKSCEPAVPFPCGRVSVSQTSKLTRAETV
FPDVDYVNSTEAETILDNITQSTQSFNDFTRVVGGEDAKPGQFPWQVVLNGKVDAFCGGSIVNEK
WIVTAAHCVETGVKITVVAGEHNIEETEHTEQKRNVIRIIPHHNYNAAINKYNHDIALLELDEPL
VLNSYVTPICIADKEYTNIFLKFGSGYVSGWGRVFHKGRSALVLQYLRVPLVDRATCLLSTKFTI
YNNMFCAGFHEGGRDSCQGDSGGPHVTEVEGTSFLTGIISWGEECAMKGKYGIYTKVSRYVNWIK

[chemical structure]

GTSESATPESGPGTSTEPSEGSAPGSPAGSPTSTEEGTSTEPSEGSAPGTSTEPSEGSAPGTSES
ATPESGPGSEPATSGSETPGSEPATSGSETPGSPAGSPTSTEEGTSESATPESGPGTSTEPSEGS
APGTSTEPSEGSAPGSPAGSPTSTEEGTSTEPSEGSAPGTSTEPSEGSAPGTSESATPESGPGTS
TEPSEGSAPGTSESATPESGPGSEPATSGSETPGTSTEPSEGSAPGTSTEPSEGSAPGTSESATP
ESGPGTSESATPESGPGSPAGSPTSTEEGTSESATPESGPGSEPATSGSETPGTSESATPESGPG
TSTEPSEGSAPGTSTEPSEGSAPGTSTEPSEGSAPGTSTEPSEGSAPGTSTEPSEGSAPGTSTEP
SEGSAPGSPAGSPTSTEEGTSTEPSEGSAPGTSESATPESGPGSEPATSGSETPGTSESATPESG
PGSEPATSGSETPGTSESATPESGPGTSTEPSEGSAPGTSESATPESGPGSPAGSPTSTEEGSPA
GSPTSTEEGSPAGSPTSTEEGTSESATPESGPGTSTEPSEGSAPGTSESATPESGPGSEPATSGS
ETPGTSESATPESGPGSEPATSGSETPGTSESATPESGPGTSTEPSEGSAPGSPAGSPTSTEEGT
SESATPESGPGSEPATSGSETPGTSESATPESGPGSPAGSPTSTEEGSPAGSPTSTEEGTSTEPS
EGSAPGTSESATPESGPGTSESATPESGPGTSESATPESGPGSEPATSGSETPGSEPATSGSETP
GSPAGSPTSTEEGTSTEPSEGSAPGTSTEPSEGSAPGSEPATSGSETPGTSESATPESGPGTSTE

[chemical structure]

SEQ ID NO: 86 K0142_AE72 pNL167
MQRVNMIMAESPGLITICLLGYLLSAECTVFLDHENANKILNRPKRYNSGKLEEFVQGNLERECM
EEKCSFEEAREVFENTERTTEFWKQYVDGDQCESNPCLNGGSCKDDINSYECWCPFGFEGKNCEL
DVTCNIKNGRCEQFCKNSADNKVVCSCTEGYRLAENQKSCEPAVPFPCGRVSVSQTSKGAPSPAG
SPTSTEEGTSESATPESGPGSEPATSGSETPGTSESATPESGPGTSTEPSEGSAPGTSTEPSEGS
APGASSLTRAETVFPDVDYVNSTEAETILDNITQSTQSFNDFTRVVGGEDAKPGQFPWQVVLNGK
VDAFCGGSIVNEKWIVTAAHCVETGVKITVVAGEHNIEETEHTEQKRNVIRIIPHHNYNAAINKY
NHDIALLELDEPLVLNSYVTPICIADKEYTNIFLKFGSGYVSGWGRVFHKGRSALVLQYLRVPLV
DRATCLLSTKFTIYNNMFCAGFHEGGRDSCQGDSGGPHVTEVEGTSFLTGIISWGEECAMKGKYG

[chemical structure]

SEQ ID NO: 87 K0142_AE144 pNL168
MQRVNMIMAESPGLITICLLGYLLSAECTVFLDHENANKILNRPKRYNSGKLEEFVQGNLERECM
EEKCSFEEAREVFENTERTTEFWKQYVDGDQCESNPCLNGGSCKDDINSYECWCPFGFEGKNCEL
DVTCNIKNGRCEQFCKNSADNKVVCSCTEGYRLAENQKSCEPAVPFPCGRVSVSQTSKGAPSPAG
SPTSTEEGTSESATPESGPGSEPATSGSETPGTSESATPESGPGTSTEPSEGSAPGTSTEPSEGS
APGTSTEPSEGSAPGTSTEPSEGSAPGTSTEPSEGSAPGTSTEPSEGSAPGSPAGSPTSTEEGTS
TEPSEGSAPGASSLTRAETVFPDVDYVNSTEAETILDNITQSTQSFNDFTRVVGGEDAKPGQFPW
QVVLNGKVDAFCGGSIVNEKWIVTAAHCVETGVKITVVAGEHNIEETEHTEQKRNVIRIIPHHNY
NAAINKYNHDIALLELDEPLVLNSYVTPICIADKEYTNIFLKFGSGYVSGWGRVFHKGRSALVLQ
YLRVPLVDRATCLLSTKFTIYNNMFCAGFHEGGRDSCQGDSGGPHVTEVEGTSFLTGIISWGEEC

[chemical structure]

[chemical structure]

SEQ ID NO: 88 K0142_AE288 pNL169
MQRVNMIMAESPGLITICLLGYLLSAECTVFLDHENANKILNRPKRYNSGKLEEFVQGNLERECM
EEKCSFEEAREVFENTERTTEFWKQYVDGDQCESNPCLNGGSCKDDINSYECWCPFGFEGKNCEL
DVTCNIKNGRCEQFCKNSADNKVVCSCTEGYRLAENQKSCEPAVPFPCGRVSVSQTSKGAPGTSE
SATPESGPGSEPATSGSETPGTSESATPESGPGSEPATSGSETPGTSESATPESGPGTSTEPSEG
SAPGSPAGSPTSTEEGTSESATPESGPGSEPATSGSETPGTSESATPESGPGSPAGSPTSTEEGS
PAGSPTSTEEGTSTEPSEGSAPGTSESATPESGPGTSESATPESGPGTSESATPESGPGSEPATS
GSETPGSEPATSGSETPGSPAGSPTSTEEGTSTEPSEGSAPGTSTEPSEGSAPGSEPATSGSETP
GTSESATPESGPGTSTEPSEGSAPASSLTRAETVFPDVDYVNSTEAETILDNITQSTQSFNDFTR
VVGGEDAKPGQFPWQVVLNGKVDAFCGGSIVNEKWIVTAAHCVETGVKITVVAGEHNIEETEHTE
QKRNVIRIIPHHNYNAAINKYNHDIALLELDEPLVLNSYVTPICIADKEYTNIFLKFGSGYVSGW
GRVFHKGRSALVLQYLRVPLVDRATCLLSTKFTIYNNMFCAGFHEGGRDSCQGDSGGPHVTEVEG

[chemical structure]

[chemical structure]

SEQ ID NO: 89 V0149_AE72 pNL170
MQRVNMIMAESPGLITICLLGYLLSAECTVFLDHENANKILNRPKRYNSGKLEEFVQGNLERECM
EEKCSFEEAREVFENTERTTEFWKQYVDGDQCESNPCLNGGSCKDDINSYECWCPFGFEGKNCEL
DVTCNIKNGRCEQFCKNSADNKVVCSCTEGYRLAENQKSCEPAVPFPCGRVSVSQTSKLTRAETV
GAPSPAGSPTSTEEGTSESATPESGPGSEPATSGSETPGTSESATPESGPGTSTEPSEGSAPGTS
TEPSEGSAPGASSFPDVDYVNSTEAETILDNITQSTQSFNDFTRVVGGEDAKPGQFPWQVVLNGK
VDAFCGGSIVNEKWIVTAAHCVETGVKITVVAGEHNIEETEHTEQKRNVIRIIPHHNYNAAINKY
NHDIALLELDEPLVLNSYVTPICIADKEYTNIFLKFGSGYVSGWGRVFHKGRSALVLQYLRVPLV
DRATCLLSTKFTIYNNMFCAGFHEGGRDSCQGDSGGPHVTEVEGTSFLTGIISWGEECAMKGKYG

[chemical structure]

SEQ ID NO: 90 V0149_AE144 pNL171
MQRVNMIMAESPGLITICLLGYLLSAECTVFLDHENANKILNRPKRYNSGKLEEFVQGNLERECM
EEKCSFEEAREVFENTERTTEFWKQYVDGDQCESNPCLNGGSCKDDINSYECWCPFGFEGKNCEL
DVTCNIKNGRCEQFCKNSADNKVVCSCTEGYRLAENQKSCEPAVPFPCGRVSVSQTSKLTRAETV
GAPSPAGSPTSTEEGTSESATPESGPGSEPATSGSETPGTSESATPESGPGTSTEPSEGSAPGTS
TEPSEGSAPGTSTEPSEGSAPGTSTEPSEGSAPGTSTEPSEGSAPGTSTEPSEGSAPGSPAGSPT
STEEGTSTEPSEGSAPGASSFPDVDYVNSTEAETILDNITQSTQSFNDFTRVVGGEDAKPGQFPW
QVVLNGKVDAFCGGSIVNEKWIVTAAHCVETGVKITVVAGEHNIEETEHTEQKRNVIRIIPHHNY
NAAINKYNHDIALLELDEPLVLNSYVTPICIADKEYTNIFLKFGSGYVSGWGRVFHKGRSALVLQ
YLRVPLVDRATCLLSTKFTIYNNMFCAGFHEGGRDSCQGDSGGPHVTEVEGTSFLTGIISWGEEC

[chemical structure]

[chemical structure]

SEQ ID NO: 91 V0149_AE288 pNL172
MQRVNMIMAESPGLITICLLGYLLSAECTVFLDHENANKILNRPKRYNSGKLEEFVQGNLERECM
EEKCSFEEAREVFENTERTTEFWKQYVDGDQCESNPCLNGGSCKDDINSYECWCPFGFEGKNCEL
DVTCNIKNGRCEQFCKNSADNKVVCSCTEGYRLAENQKSCEPAVPFPCGRVSVSQTSKLTRAETV
GAPGTSESATPESGPGSEPATSGSETPGTSESATPESGPGSEPATSGSETPGTSESATPESGPGT
STEPSEGSAPGSPAGSPTSTEEGTSESATPESGPGSEPATSGSETPGTSESATPESGPGSPAGSP
TSTEEGSPAGSPTSTEEGTSTEPSEGSAPGTSESATPESGPGTSESATPESGPGTSESATPESGP
GSEPATSGSETPGSEPATSGSETPGSPAGSPTSTEEGTSTEPSEGSAPGTSTEPSEGSAPGSEPA
TSGSETPGTSESATPESGPGTSTEPSEGSAPASSFPDVDYVNSTEAETILDNITQSTQSFNDFTR
VVGGEDAKPGQFPWQVVLNGKVDAFCGGSIVNEKWIVTAAHCVETGVKITVVAGEHNIEETEHTE
QKRNVIRIIPHHNYNAAINKYNHDIALLELDEPLVLNSYVTPICIADKEYTNIFLKFGSGYVSGW
GRVFHKGRSALVLQYLRVPLVDRATCLLSTKFTIYNNMFCAGFHEGGRDSCQGDSGGPHVTEVEG

[chemical structure]

[chemical structure]

SEQ ID NO: 92 E0162_AE72 pNL173
MQRVNMIMAESPGLITICLLGYLLSAECTVFLDHENANKILNRPKRYNSGKLEEFVQGNLERECM
EEKCSFEEAREVFENTERTTEFWKQYVDGDQCESNPCLNGGSCKDDINSYECWCPFGFEGKNCEL
DVTCNIKNGRCEQFCKNSADNKVVCSCTEGYRLAENQKSCEPAVPFPCGRVSVSQTSKLTRAETV
FPDVDYVNSTEAEGAPSPAGSPTSTEEGTSESATPESGPGSEPATSGSETPGTSESATPESGPGT
STEPSEGSAPGTSTEPSEGSAPGASSTILDNITQSTQSFNDFTRVVGGEDAKPGQFPWQVVLNGK
VDAFCGGSIVNEKWIVTAAHCVETGVKITVVAGEHNIEETEHTEQKRNVIRIIPHHNYNAAINKY
NHDIALLELDEPLVLNSYVTPICIADKEYTNIFLKFGSGYVSGWGRVFHKGRSALVLQYLRVPLV
DRATCLLSTKFTIYNNMFCAGFHEGGRDSCQGDSGGPHVTEVEGTSFLTGIISWGEECAMKGKYG

[chemical structure]

SEQ ID NO: 93 E0162_AE144 pNL174
MQRVNMIMAESPGLITICLLGYLLSAECTVFLDHENANKILNRPKRYNSGKLEEFVQGNLERECM
EEKCSFEEAREVFENTERTTEFWKQYVDGDQCESNPCLNGGSCKDDINSYECWCPFGFEGKNCEL
DVTCNIKNGRCEQFCKNSADNKVVCSCTEGYRLAENQKSCEPAVPFPCGRVSVSQTSKLTRAETV
FPDVDYVNSTEAEGAPSPAGSPTSTEEGTSESATPESGPGSEPATSGSETPGTSESATPESGPGT
STEPSEGSAPGTSTEPSEGSAPGTSTEPSEGSAPGTSTEPSEGSAPGTSTEPSEGSAPGTSTEPS
EGSAPGSPAGSPTSTEEGTSTEPSEGSAPGASSTILDNITQSTQSFNDFTRVVGGEDAKPGQFPW
QVVLNGKVDAFCGGSIVNEKWIVTAAHCVETGVKITVVAGEHNIEETEHTEQKRNVIRIIPHHNY
NAAINKYNHDIALLELDEPLVLNSYVTPICIADKEYTNIFLKFGSGYVSGWGRVFHKGRSALVLQ
YLRVPLVDRATCLLSTKFTIYNNMFCAGFHEGGRDSCQGDSGGPHVTEVEGTSFLTGIISWGEEC

[chemical structure]

[chemical structure]

SEQ ID NO: 94 E0162_AE288 pNL175
MQRVNMIMAESPGLITICLLGYLLSAECTVFLDHENANKILNRPKRYNSGKLEEFVQGNLERECM
EEKCSFEEAREVFENTERTTEFWKQYVDGDQCESNPCLNGGSCKDDINSYECWCPFGFEGKNCEL
DVTCNIKNGRCEQFCKNSADNKVVCSCTEGYRLAENQKSCEPAVPFPCGRVSVSQTSKLTRAETV
FPDVDYVNSTEAEGAPGTSESATPESGPGSEPATSGSETPGTSESATPESGPGSEPATSGSETPG
TSESATPESGPGTSTEPSEGSAPGSPAGSPTSTEEGTSESATPESGPGSEPATSGSETPGTSESA
TPESGPGSPAGSPTSTEEGSPAGSPTSTEEGTSTEPSEGSAPGTSESATPESGPGTSESATPESG
PGTSESATPESGPGSEPATSGSETPGSEPATSGSETPGSPAGSPTSTEEGTSTEPSEGSAPGTST
EPSEGSAPGSEPATSGSETPGTSESATPESGPGTSTEPSEGSAPASSTILDNITQSTQSFNDFTR
VVGGEDAKPGQFPWQVVLNGKVDAFCGGSIVNEKWIVTAAHCVETGVKITVVAGEHNIEETEHTE
QKRNVIRIIPHHNYNAAINKYNHDIALLELDEPLVLNSYVTPICIADKEYTNIFLKFGSGYVSGW
GRVFHKGRSALVLQYLRVPLVDRATCLLSTKFTIYNNMFCAGFHEGGRDSCQGDSGGPHVTEVEG

[chemical structure]

[chemical structure]

SEQ ID NO: 95 D0166_AE72 pNL176
MQRVNMIMAESPGLITICLLGYLLSAECTVFLDHENANKILNRPKRYNSGKLEEFVQGNLERECM
EEKCSFEEAREVFENTERTTEFWKQYVDGDQCESNPCLNGGSCKDDINSYECWCPFGFEGKNCEL
DVTCNIKNGRCEQFCKNSADNKVVCSCTEGYRLAENQKSCEPAVPFPCGRVSVSQTSKLTRAETV
FPDVDYVNSTEAETILDGAPSPAGSPTSTEEGTSESATPESGPGSEPATSGSETPGTSESATPES
GPGTSTEPSEGSAPGTSTEPSEGSAPGASSNITQSTQSFNDFTRVVGGEDAKPGQFPWQVVLNGK
VDAFCGGSIVNEKWIVTAAHCVETGVKITVVAGEHNIEETEHTEQKRNVIRIIPHHNYNAAINKY
NHDIALLELDEPLVLNSYVTPICIADKEYTNIFLKFGSGYVSGWGRVFHKGRSALVLQYLRVPLV
DRATCLLSTKFTIYNNMFCAGFHEGGRDSCQGDSGGPHVTEVEGTSFLTGIISWGEECAMKGKYG

[chemical structure]

SEQ ID NO: 96 D0166_AE144 pNL177
MQRVNMIMAESPGLITICLLGYLLSAECTVFLDHENANKILNRPKRYNSGKLEEFVQGNLERECM
EEKCSFEEAREVFENTERTTEFWKQYVDGDQCESNPCLNGGSCKDDINSYECWCPFGFEGKNCEL
DVTCNIKNGRCEQFCKNSADNKVVCSCTEGYRLAENQKSCEPAVPFPCGRVSVSQTSKLTRAETV
FPDVDYVNSTEAETILDGAPSPAGSPTSTEEGTSESATPESGPGSEPATSGSETPGTSESATPES
GPGTSTEPSEGSAPGTSTEPSEGSAPGTSTEPSEGSAPGTSTEPSEGSAPGTSTEPSEGSAPGTS
TEPSEGSAPGSPAGSPTSTEEGTSTEPSEGSAPGASSNITQSTQSFNDFIRVVGGEDAKPGQFPW
QVVLNGKVDAFCGGSIVNEKWIVTAAHCVETGVKITVVAGEHNIEETEHTEQKRNVIRIIPHHNY
NAAINKYNHDIALLELDEPLVLNSYVTPICIADKEYTNIFLKFGSGYVSGWGRVFHKGRSALVLQ
YLRVPLVDRATCLLSTKFTIYNNMFCAGFHEGGRDSCQGDSGGPHVTEVEGTSFLTGIISWGEEC

[chemical structure]

[chemical structure]

SEQ ID NO: 97 D0166_AE288 pNL178
MQRVNMIMAESPGLITICLLGYLLSAECTVFLDHENANKILNRPKRYNSGKLEEFVQGNLERECM
EEKCSFEEAREVFENTERTTEFWKQYVDGDQCESNPCLNGGSCKDDINSYECWCPFGFEGKNCEL
DVTCNIKNGRCEQFCKNSADNKVVCSCTEGYRLAENQKSCEPAVPFPCGRVSVSQTSKLTRAETV
FPDVDYVNSTEAETILDGAPGTSESATPESGPGSEPATSGSETPGTSESATPESGPGSEPATSGS
ETPGTSESATPESGPGTSTEPSEGSAPGSPAGSPTSTEEGTSESATPESGPGSEPATSGSETPGT
SESATPESGPGSPAGSPTSTEEGSPAGSPTSTEEGTSTEPSEGSAPGTSESATPESGPGTSESAT
PESGPGTSESATPESGPGSEPATSGSETPGSEPATSGSETPGSPAGSPTSTEEGTSTEPSEGSAP
GTSTEPSEGSAPGSEPATSGSETPGTSESATPESGPGTSTEPSEGSAPASSNITQSTQSFNDFIR
VVGGEDAKPGQFPWQVVLNGKVDAFCGGSIVNEKWIVTAAHCVETGVKITVVAGEHNIEETEHTE
QKRNVIRIIPHHNYNAAINKYNHDIALLELDEPLVLNSYVTPICIADKEYTNIFLKFGSGYVSGW
GRVFHKGRSALVLQYLRVPLVDRATCLLSTKFTIYNNMFCAGFHEGGRDSCQGDSGGPHVTEVEG

[chemical structure]

[chemical structure]

SEQ ID NO: 98 S0174_AE72 pNL179
MQRVNMIMAESPGLITICLLGYLLSAECTVFLDHENANKILNRPKRYNSGKLEEFVQGNLERECM
EEKCSFEEAREVFENTERTTEFWKQYVDGDQCESNPCLNGGSCKDDINSYECWCPFGFEGKNCEL
DVTCNIKNGRCEQFCKNSADNKVVCSCTEGYRLAENQKSCEPAVPFPCGRVSVSQTSKLTRAETV
FPDVDYVNSTEAETILDNITQSTQSGAPSPAGSPTSTEEGTSESATPESGPGSEPATSGSETPGT
SESATPESGPGTSTEPSEGSAPGTSTEPSEGSAPGASSFNDFIRVVGGEDAKPGQFPWQVVLNGK
VDAFCGGSIVNEKWIVTAAHCVETGVKITVVAGEHNIEETEHTEQKRNVIRIIPHHNYNAAINKY
NHDIALLELDEPLVLNSYVTPICIADKEYTNIFLKFGSGYVSGWGRVFHKGRSALVLQYLRVPLV
DRATCLLSTKFTIYNNMFCAGFHEGGRDSCQGDSGGPHVTEVEGTSFLTGIISWGEECAMKGKYG

[chemical structure]

SEQ ID NO: 99 S0174_AE144 pNL180
MQRVNMIMAESPGLITICLLGYLLSAECTVFLDHENANKILNRPKRYNSGKLEEFVQGNLERECM
EEKCSFEEAREVFENTERTTEFWKQYVDGDQCESNPCLNGGSCKDDINSYECWCPFGFEGKNCEL
DVTCNIKNGRCEQFCKNSADNKVVCSCTEGYRLAENQKSCEPAVPFPCGRVSVSQTSKLTRAETV
FPDVDYVNSTEAETILDNITQSTQSGAPSPAGSPTSTEEGTSESATPESGPGSEPATSGSETPGT
SESATPESGPGTSTEPSEGSAPGTSTEPSEGSAPGTSTEPSEGSAPGTSTEPSEGSAPGTSTEPS
EGSAPGTSTEPSEGSAPGSPAGSPTSTEEGTSTEPSEGSAPGASSFNDFIRVVGGEDAKPGQFPW
QVVLNGKVDAFCGGSIVNEKWIVTAAHCVETGVKITVVAGEHNIEETEHTEQKRNVIRIIPHHNY
NAAINKYNHDIALLELDEPLVLNSYVTPICIADKEYTNIFLKFGSGYVSGWGRVFHKGRSALVLQ
YLRVPLVDRATCLLSTKFTIYNNMFCAGFHEGGRDSCQGDSGGPHVTEVEGTSFLTGIISWGEEC

[chemical structure]

[chemical structure]

SEQ ID NO: 100 S0174_AE288 pNL181
MQRVNMIMAESPGLITICLLGYLLSAECTVFLDHENANKILNRPKRYNSGKLEEFVQGNLERECM
EEKCSFEEAREVFENTERTTEFWKQYVDGDQCESNPCLNGGSCKDDINSYECWCPFGFEGKNCEL
DVTCNIKNGRCEQFCKNSADNKVVCSCTEGYRLAENQKSCEPAVPFPCGRVSVSQTSKLTRAETV
FPDVDYVNSTEAETILDNITQSTQSGAPGTSESATPESGPGSEPATSGSETPGTSESATPESGPG
SEPATSGSETPGTSESATPESGPGTSTEPSEGSAPGSPAGSPTSTEEGTSESATPESGPGSEPAT
SGSETPGTSESATPESGPGSPAGSPTSTEEGSPAGSPTSTEEGTSTEPSEGSAPGTSESATPESG
PGTSESATPESGPGTSESATPESGPGSEPATSGSETPGSEPATSGSETPGSPAGSPTSTEEGTST
EPSEGSAPGTSTEPSEGSAPGSEPATSGSETPGTSESATPESGPGTSTEPSEGSAPASSFNDFTR
VVGGEDAKPGQFPWQVVLNGKVDAFCGGSIVNEKWIVTAAHCVETGVKITVVAGEHNIEETEHTE
QKRNVIRIIPHHNYNAAINKYNHDIALLELDEPLVLNSYVTPICIADKEYTNIFLKFGSGYVSGW
GRVFHKGRSALVLQYLRVPLVDRATCLLSTKFTIYNNMFCAGFHEGGRDSCQGDSGGPHVTEVEG

[chemical structure]

[chemical structure]

SEQ ID NO: 101 E0224_AE72 pNL182
MQRVNMIMAESPGLITICLLGYLLSAECTVFLDHENANKILNRPKRYNSGKLEEFVQGNLERECM
EEKCSFEEAREVFENTERTTEFWKQYVDGDQCESNPCLNGGSCKDDINSYECWCPFGFEGKNCEL
DVTCNIKNGRCEQFCKNSADNKVVCSCTEGYRLAENQKSCEPAVPFPCGRVSVSQTSKLTRAETV
FPDVDYVNSTEAETILDNITQSTQSFNDFTRVVGGEDAKPGQFPWQVVLNGKVDAFCGGSIVNEK
WIVTAAHCVEGAPSPAGSPTSTEEGTSESATPESGPGSEPATSGSETPGTSESATPESGPGTSTE
PSEGSAPGTSTEPSEGSAPGASSTGVKITVVAGEHNIEETEHTEQKRNVIRIIPHHNYNAAINKY
NHDIALLELDEPLVLNSYVTPICIADKEYTNIFLKFGSGYVSGWGRVFHKGRSALVLQYLRVPLV
DRATCLLSTKFTIYNNMFCAGFHEGGRDSCQGDSGGPHVTEVEGTSFLTGIISWGEECAMKGKYG

[chemical structure]

SEQ ID NO: 102 E0224_AE144 pNL183
MQRVNMIMAESPGLITICLLGYLLSAECTVFLDHENANKILNRPKRYNSGKLEEFVQGNLERECM
EEKCSFEEAREVFENTERTTEFWKQYVDGDQCESNPCLNGGSCKDDINSYECWCPFGFEGKNCEL
DVTCNIKNGRCEQFCKNSADNKVVCSCTEGYRLAENQKSCEPAVPFPCGRVSVSQTSKLTRAETV
FPDVDYVNSTEAETILDNITQSTQSFNDFTRVVGGEDAKPGQFPWQVVLNGKVDAFCGGSIVNEK
WIVTAAHCVEGAPSPAGSPTSTEEGTSESATPESGPGSEPATSGSETPGTSESATPESGPGTSTE
PSEGSAPGTSTEPSEGSAPGTSTEPSEGSAPGTSTEPSEGSAPGTSTEPSEGSAPGTSTEPSEGS
APGSPAGSPTSTEEGTSTEPSEGSAPGASSIGVKITVVAGEHNIEETEHTEQKRNVIRIIPHHNY
NAAINKYNHDIALLELDEPLVLNSYVTPICIADKEYTNIFLKFGSGYVSGWGRVFHKGRSALVLQ
YLRVPLVDRATCLLSTKFTIYNNMFCAGFHEGGRDSCQGDSGGPHVTEVEGTSFLTGIISWGEEC

[chemical structure]

[chemical structure]

SEQ ID NO: 103 E0224_AE288 pNL184
MQRVNMIMAESPGLITICLLGYLLSAECTVFLDHENANKILNRPKRYNSGKLEEFVQGNLERECM
EEKCSFEEAREVFENTERTTEFWKQYVDGDQCESNPCLNGGSCKDDINSYECWCPFGFEGKNCEL
DVTCNIKNGRCEQFCKNSADNKVVCSCTEGYRLAENQKSCEPAVPFPCGRVSVSQTSKLTRAETV
FPDVDYVNSTEAETILDNITQSTQSFNDFTRVVGGEDAKPGQFPWQVVLNGKVDAFCGGSIVNEK
WIVTAAHCVEGAPGTSESATPESGPGSEPATSGSETPGTSESATPESGPGSEPATSGSETPGTSE
SATPESGPGTSTEPSEGSAPGSPAGSPTSTEEGTSESATPESGPGSEPATSGSETPGTSESATPE
SGPGSPAGSPTSTEEGSPAGSPTSTEEGTSTEPSEGSAPGTSESATPESGPGTSESATPESGPGT
SESATPESGPGSEPATSGSETPGSEPATSGSETPGSPAGSPTSTEEGTSTEPSEGSAPGTSTEPS
EGSAPGSEPATSGSETPGTSESATPESGPGTSTEPSEGSAPASSIGVKITVVAGEHNIEETEHTE
QKRNVIRIIPHHNYNAAINKYNHDIALLELDEPLVLNSYVTPICIADKEYTNIFLKFGSGYVSGW
GRVFHKGRSALVLQYLRVPLVDRATCLLSTKFTIYNNMFCAGFHEGGRDSCQGDSGGPHVIEVEG

[chemical structure]

[chemical structure]

SEQ ID NO: 104 K0413_AE72 pNL185
MQRVNMIMAESPGLITICLLGYLLSAECTVFLDHENANKILNRPKRYNSGKLEEFVQGNLERECM
EEKCSFEEAREVFENTERTTEFWKQYVDGDQCESNPCLNGGSCKDDINSYECWCPFGFEGKNCEL
DVTCNIKNGRCEQFCKNSADNKVVCSCTEGYRLAENQKSCEPAVPFPCGRVSVSQTSKLTRAETV
FPDVDYVNSTEAETILDNITQSTQSFNDFTRVVGGEDAKPGQFPWQVVLNGKVDAFCGGSIVNEK
WIVTAAHCVETGVKITVVAGEHNIEETEHTEQKRNVIRIIPHHNYNAAINKYNHDIALLELDEPL
VLNSYVTPICIADKEYTNIFLKFGSGYVSGWGRVFHKGRSALVLQYLRVPLVDRATCLLSTKFTI
YNNMFCAGFHEGGRDSCQGDSGGPHVTEVEGTSFLTGIISWGEECAMKGKYGIYTKVSRYVNWIK
EKTKGAPSPAGSPTSTEEGTSESATPESGPGSEPATSGSETPGTSESATPESGPGTSTEPSEGSA

[chemical structure]

SEQ ID NO: 105 K0413_AE144 pNL186
MQRVNMIMAESPGLITICLLGYLLSAECTVFLDHENANKILNRPKRYNSGKLEEFVQGNLERECM
EEKCSFEEAREVFENTERTTEFWKQYVDGDQCESNPCLNGGSCKDDINSYECWCPFGFEGKNCEL
DVTCNIKNGRCEQFCKNSADNKVVCSCTEGYRLAENQKSCEPAVPFPCGRVSVSQTSKLTRAETV
FPDVDYVNSTEAETILDNITQSTQSFNDFTRVVGGEDAKPGQFPWQVVLNGKVDAFCGGSIVNEK
WIVTAAHCVETGVKITVVAGEHNIEETEHTEQKRNVIRIIPHHNYNAAINKYNHDIALLELDEPL
VLNSYVTPICIADKEYTNIFLKFGSGYVSGWGRVFHKGRSALVLQYLRVPLVDRATCLLSTKFTI
YNNMFCAGFHEGGRDSCQGDSGGPHVTEVEGTSFLTGIISWGEECAMKGKYGIYTKVSRYVNWIK
EKTKGAPSPAGSPTSTEEGTSESATPESGPGSEPATSGSETPGTSESATPESGPGTSTEPSEGSA
PGTSTEPSEGSAPGTSTEPSEGSAPGTSTEPSEGSAPGTSTEPSEGSAPGTSTEPSEGSAPGSPA

[chemical structure]

[chemical structure]

SEQ ID NO: 106 K0413_AE288 pNL187
MQRVNMIMAESPGLITICLLGYLLSAECTVFLDHENANKILNRPKRYNSGKLEEFVQGNLERECM
EEKCSFEEAREVFENTERTTEFWKQYVDGDQCESNPCLNGGSCKDDINSYECWCPFGFEGKNCEL
DVTCNIKNGRCEQFCKNSADNKVVCSCTEGYRLAENQKSCEPAVPFPCGRVSVSQTSKLTRAETV
FPDVDYVNSTEAETILDNITQSTQSFNDFTRVVGGEDAKPGQFPWQVVLNGKVDAFCGGSIVNEK
WIVTAAHCVETGVKITVVAGEHNIEETEHTEQKRNVIRIIPHHNYNAAINKYNHDIALLELDEPL
VLNSYVTPICIADKEYTNIFLKFGSGYVSGWGRVFHKGRSALVLQYLRVPLVDRATCLLSTKFTI
YNNMFCAGFHEGGRDSCQGDSGGPHVTEVEGTSFLTGIISWGEECAMKGKYGIYTKVSRYVNWIK
EKTKGAPGTSESATPESGPGSEPATSGSETPGTSESATPESGPGSEPATSGSETPGTSESATPES
GPGTSTEPSEGSAPGSPAGSPTSTEEGTSESATPESGPGSEPATSGSETPGTSESATPESGPGSP
AGSPTSTEEGSPAGSPTSTEEGTSTEPSEGSAPGTSESATPESGPGTSESATPESGPGTSESATP
ESGPGSEPATSGSETPGSEPATSGSETPGSPAGSPTSTEEGTSTEPSEGSAPGTSTEPSEGSAPG

[chemical structure]

[chemical structure]

SEQ ID NO: 107 A0103_AE72 pNL188
MQRVNMIMAESPGLITICLLGYLLSAECTVFLDHENANKILNRPKRYNSGKLEEFVQGNLERECM
EEKCSFEEAREVFENTERTTEFWKQYVDGDQCESNPCLNGGSCKDDINSYECWCPFGFEGKNCEL
DVTCNIKNGRCEQFCKNSAGAPSPAGSPTSTEEGTSESATPESGPGSEPATSGSETPGTSESATP
ESGPGTSTEPSEGSAPGTSTEPSEGSAPGASSDNKVVCSCTEGYRLAENQKSCEPAVPFPCGRVS
VSQTSKLTRAETVFPDVDYVNSTEAETILDNITQSTQSFNDFTRVVGGEDAKPGQFPWQVVLNGK
VDAFCGGSIVNEKWIVTAAHCVETGVKITVVAGEHNIEETEHTEQKRNVIRIIPHHNYNAAINKY
NHDIALLELDEPLVLNSYVTPICIADKEYTNIFLKFGSGYVSGWGRVFHKGRSALVLQYLRVPLV
DRATCLLSTKFTIYNNMFCAGFHEGGRDSCQGDSGGPHVTEVEGTSFLTGIISWGEECAMKGKYG

[chemical structure]

SEQ ID NO: 108 A0103_AE144 pNL189
MQRVNMIMAESPGLITICLLGYLLSAECTVFLDHENANKILNRPKRYNSGKLEEFVQGNLERECM
EEKCSFEEAREVFENTERTTEFWKQYVDGDQCESNPCLNGGSCKDDINSYECWCPFGFEGKNCEL
DVTCNIKNGRCEQFCKNSAGAPSPAGSPTSTEEGTSESATPESGPGSEPATSGSETPGTSESATP
ESGPGTSTEPSEGSAPGTSTEPSEGSAPGTSTEPSEGSAPGTSTEPSEGSAPGTSTEPSEGSAPG
TSTEPSEGSAPGSPAGSPTSTEEGTSTEPSEGSAPGASSDNKVVCSCTEGYRLAENQKSCEPAVP
FPCGRVSVSQTSKLTRAETVFPDVDYVNSTEAETILDNITQSTQSFNDFTRVVGGEDAKPGQFPW
QVVLNGKVDAFCGGSIVNEKWIVTAAHCVETGVKITVVAGEHNIEETEHTEQKRNVIRIIPHHNY
NAAINKYNHDIALLELDEPLVLNSYVTPICIADKEYTNIFLKFGSGYVSGWGRVFHKGRSALVLQ
YLRVPLVDRATCLLSTKFTIYNNMFCAGFHEGGRDSCQGDSGGPHVTEVEGTSFLTGIISWGEEC

[chemical structure]

[chemical structure]

SEQ ID NO: 109 A0103_AE288 pNL190
MQRVNMIMAESPGLITICLLGYLLSAECTVFLDHENANKILNRPKRYNSGKLEEFVQGNLERECM
EEKCSFEEAREVFENTERTTEFWKQYVDGDQCESNPCLNGGSCKDDINSYECWCPFGFEGKNCEL
DVTCNIKNGRCEQFCKNSAGAPGTSESATPESGPGSEPATSGSETPGTSESATPESGPGSEPATS
GSETPGTSESATPESGPGTSTEPSEGSAPGSPAGSPTSTEEGTSESATPESGPGSEPATSGSETP
GTSESATPESGPGSPAGSPTSTEEGSPAGSPTSTEEGTSTEPSEGSAPGTSESATPESGPGTSES
ATPESGPGTSESATPESGPGSEPATSGSETPGSEPATSGSETPGSPAGSPTSTEEGTSTEPSEGS
APGTSTEPSEGSAPGSEPATSGSETPGTSESATPESGPGTSTEPSEGSAPASSDNKVVCSCTEGY
RLAENQKSCEPAVPFPCGRVSVSQTSKLTRAETVFPDVDYVNSTEAETILDNITQSTQSFNDFTR
VVGGEDAKPGQFPWQVVLNGKVDAFCGGSIVNEKWIVTAAHCVETGVKITVVAGEHNIEETEHTE
QKRNVIRIIPHHNYNAAINKYNHDIALLELDEPLVLNSYVTPICIADKEYTNIFLKFGSGYVSGW
GRVFHKGRSALVLQYLRVPLVDRATCLLSTKFTIYNNMFCAGFHEGGRDSCQGDSGGPHVTEVEG

[chemical structure]

[chemical structure]

SEQ ID NO: 110 G0226 AE42 pNL195
MQRVNMIMAESPGLITICLLGYLLSAECTVFLDHENANKILNRPKRYNSGKLEEFVQGNLERECM
EEKCSFEEAREVFENTERTTEFWKQYVDGDQCESNPCLNGGSCKDDINSYECWCPFGFEGKNCEL
DVTCNIKNGRCEQFCKNSADNKVVCSCTEGYRLAENQKSCEPAVPFPCGRVSVSQTSKLTRAETV
FPDVDYVNSTEAETILDNITQSTQSFNDFTRVVGGEDAKPGQFPWQVVLNGKVDAFCGGSIVNEK
WIVTAAHCVEIGGAPGSPAGSPTSTEEGTSESATPESGPGSEPATSGSETPASSVKITVVAGEHN
IEETEHTEQKRNVIRIIPHHNYNAAINKYNHDIALLELDEPLVLNSYVTPICIADKEYTNIFLKF
GSGYVSGWGRVFHKGRSALVLQYLRVPLVDRATCLLSTKFTIYNNMFCAGFHEGGRDSCQGDSGG

[chemical structure]

[chemical structure]

SEQ ID NO: 111 K0228_AE42 pNL196
MQRVNMIMAESPGLITICLLGYLLSAECTVFLDHENANKILNRPKRYNSGKLEEFVQGNLERECM
EEKCSFEEAREVFENTERTTEFWKQYVDGDQCESNPCLNGGSCKDDINSYECWCPFGFEGKNCEL
DVTCNIKNGRCEQFCKNSADNKVVCSCTEGYRLAENQKSCEPAVPFPCGRVSVSQTSKLTRAETV
FPDVDYVNSTEAETILDNITQSTQSFNDFTRVVGGEDAKPGQFPWQVVLNGKVDAFCGGSIVNEK
WIVTAAHCVETGVKGAPGSPAGSPTSTEEGTSESATPESGPGSEPATSGSETPASSITVVAGEHN
IEETEHTEQKRNVIRIIPHHNYNAAINKYNHDIALLELDEPLVLNSYVTPICIADKEYTNIFLKF
GSGYVSGWGRVFHKGRSALVLQYLRVPLVDRATCLLSTKFTIYNNMFCAGFHEGGRDSCQGDSGG

[chemical structure]

[chemical structure]

SEQ ID NO: 112 T0230_AE42 pNL197
MQRVNMIMAESPGLITICLLGYLLSAECTVFLDHENANKILNRPKRYNSGKLEEFVQGNLERECM
EEKCSFEEAREVFENTERTTEFWKQYVDGDQCESNPCLNGGSCKDDINSYECWCPFGFEGKNCEL
DVTCNIKNGRCEQFCKNSADNKVVCSCTEGYRLAENQKSCEPAVPFPCGRVSVSQTSKLTRAETV
FPDVDYVNSTEAETILDNITQSTQSFNDFTRVVGGEDAKPGQFPWQVVLNGKVDAFCGGSIVNEK
WIVTAAHCVETGVKITGAPGSPAGSPTSTEEGTSESATPESGPGSEPATSGSETPASSVVAGEHN
IEETEHTEQKRNVIRIIPHHNYNAAINKYNHDIALLELDEPLVLNSYVTPICIADKEYTNIFLKF
GSGYVSGWGRVFHKGRSALVLQYLRVPLVDRATCLLSTKFTIYNNMFCAGFHEGGRDSCQGDSGG

[chemical structure]

[chemical structure]

SEQ ID NO: 113 N0105_AE42 pNL198
MQRVNMIMAESPGLITICLLGYLLSAECTVFLDHENANKILNRPKRYNSGKLEEFVQGNLERECM
EEKCSFEEAREVFENTERTTEFWKQYVDGDQCESNPCLNGGSCKDDINSYECWCPFGFEGKNCEL
DVTCNIKNGRCEQFCKNSADNGAPGSPAGSPTSTEEGTSESATPESGPGSEPATSGSETPASSKV
VCSCTEGYRLAENQKSCEPAVPFPCGRVSVSQTSKLTRAETVFPDVDYVNSTEAETILDNITQST
QSFNDFTRVVGGEDAKPGQFPWQVVLNGKVDAFCGGSIVNEKWIVTAAHCVETGVKITVVAGEHN
IEETEHTEQKRNVIRIIPHHNYNAAINKYNHDIALLELDEPLVLNSYVTPICIADKEYTNIFLKF
GSGYVSGWGRVFHKGRSALVLQYLRVPLVDRATCLLSTKFTIYNNMFCAGFHEGGRDSCQGDSGG

[chemical structure]

[chemical structure]

SEQ ID NO: 114 S0283_AE42 pNL199
MQRVNMIMAESPGLITICLLGYLLSAECTVFLDHENANKILNRPKRYNSGKLEEFVQGNLERECM
EEKCSFEEAREVFENTERTTEFWKQYVDGDQCESNPCLNGGSCKDDINSYECWCPFGFEGKNCEL
DVTCNIKNGRCEQFCKNSADNKVVCSCTEGYRLAENQKSCEPAVPFPCGRVSVSQTSKLTRAETV
FPDVDYVNSTEAETILDNITQSTQSFNDFTRVVGGEDAKPGQFPWQVVLNGKVDAFCGGSIVNEK
WIVTAAHCVETGVKITVVAGEHNIEETEHTEQKRNVIRIIPHHNYNAAINKYNHDIALLELDEPL
VLNSGAPGSPAGSPTSTEEGTSESATPESGPGSEPATSGSETPASSYVTPICIADKEYTNIFLKF
GSGYVSGWGRVFHKGRSALVLQYLRVPLVDRATCLLSTKFTIYNNMFCAGFHEGGRDSCQGDSGG

[chemical structure]

[chemical structure]

SEQ ID NO: 115 CT_AE72 pNL202
MQRVNMIMAESPGLITICLLGYLLSAECTVFLDHENANKILNRPKRYNSGKLEEFVQGNLERECM
EEKCSFEEAREVFENTERTTEFWKQYVDGDQCESNPCLNGGSCKDDINSYECWCPFGFEGKNCEL
DVTCNIKNGRCEQFCKNSADNKVVCSCTEGYRLAENQKSCEPAVPFPCGRVSVSQTSKLTRAETV
FPDVDYVNSTEAETILDNITQSTQSFNDFTRVVGGEDAKPGQFPWQVVLNGKVDAFCGGSIVNEK
WIVTAAHCVETGVKITVVAGEHNIEETEHTEQKRNVIRIIPHHNYNAAINKYNHDIALLELDEPL
VLNSYVTPICIADKEYTNIFLKFGSGYVSGWGRVFHKGRSALVLQYLRVPLVDRATCLLSTKFTI
YNNMFCAGFHEGGRDSCQGDSGGPHVTEVEGTSFLTGIISWGEECAMKGKYGIYTKVSRYVNWIK

[chemical structure]

[chemical structure]

[chemical structure]

SEQ ID NO: 116 C-term-AE864 FIX-092
MQRVNMIMAESPGLITICLLGYLLSAECTVFLDHENANKILNRPKRYNSGKLEEFVQGNLERECM
EEKCSFEEAREVFENTERTTEFWKQYVDGDQCESNPCLNGGSCKDDINSYECWCPFGFEGKNCEL
DVTCNIKNGRCEQFCKNSADNKVVCSCTEGYRLAENQKSCEPAVPFPCGRVSVSQTSKLTRAETV
FPDVDYVNSTEAETILDNITQSTQSFNDFTRVVGGEDAKPGQFPWQVVLNGKVDAFCGGSIVNEK
WIVTAAHCVETGVKITVVAGEHNIEETEHTEQKRNVIRIIPHHNYNAAINKYNHDIALLELDEPL
VLNSYVTPICIADKEYTNIFLKFGSGYVSGWGRVFHKGRSALVLQYLRVPLVDRATCLRSTKFTI
YNNMFCAGFHEGGRDSCQGDSGGPHVTEVEGTSFLTGIISWGEECAMKGKYGIYTKVSRYVNWIK

[chemical structure]

TSTEEGTSTEPSEGSAPGTSTEPSEGSAPGTSESATPESGPGSEPATSGSETPGSEPATSGSETP
GSPAGSPTSTEEGTSESATPESGPGTSTEPSEGSAPGTSTEPSEGSAPGSPAGSPTSTEEGTSTE
PSEGSAPGTSTEPSEGSAPGTSESATPESGPGTSTEPSEGSAPGTSESATPESGPGSEPATSGSE
TPGTSTEPSEGSAPGTSTEPSEGSAPGTSESATPESGPGTSESATPESGPGSPAGSPTSTEEGTS
ESATPESGPGSEPATSGSETPGTSESATPESGPGTSTEPSEGSAPGTSTEPSEGSAPGTSTEPSE
GSAPGTSTEPSEGSAPGTSTEPSEGSAPGTSTEPSEGSAPGSPAGSPTSTEEGTSTEPSEGSAPG
TSESATPESGPGSEPATSGSETPGTSESATPESGPGSEPATSGSETPGTSESATPESGPGTSTEP
SEGSAPGTSESATPESGPGSPAGSPTSTEEGSPAGSPTSTEEGSPAGSPTSTEEGTSESATPESG
PGTSTEPSEGSAPGTSESATPESGPGSEPATSGSETPGTSESATPESGPGSEPATSGSETPGTSE
SATPESGPGTSTEPSEGSAPGSPAGSPTSTEEGTSESATPESGPGSEPATSGSETPGTSESATPE
SGPGSPAGSPTSTEEGSPAGSPTSTEEGTSTEPSEGSAPGTSESATPESGPGTSESATPESGPGT
SESATPESGPGSEPATSGSETPGSEPATSGSETPGSPAGSPTSTEEGTSTEPSEGSAPGTSTEPS
EGSAPGSEPATSGSETPGTSESATPESGPGTSTEPSEGSAPGSSS
SEQ ID NO: 117 C-Term-AE144 pJH0131
MQRVNMIMAESPGLITICLLGYLLSAECTVFLDHENANKILNRPKRYNSGKLEEFVQGNLERECM
EEKCSFEEAREVFENTERTTEFWKQYVDGDQCESNPCLNGGSCKDDINSYECWCPFGFEGKNCEL
DVTCNIKNGRCEQFCKNSADNKVVCSCTEGYRLAENQKSCEPAVPFPCGRVSVSQTSKLTRAETV
FPDVDYVNSTEAETILDNITQSTQSFNDFTRVVGGEDAKPGQFPWQVVLNGKVDAFCGGSIVNEK
WIVTAAHCVETGVKITVVAGEHNIEETEHTEQKRNVIRIIPHHNYNAAINKYNHDIALLELDEPL
VLNSYVTPICIADKEYTNIFLKFGSGYVSGWGRVFHKGRSALVLQYLRVPLVDRATCLLSTKFTI
YNNMFCAGFHEGGRDSCQGDSGGPHVTEVEGTSFLTGIISWGEECAMKGKYGIYTKVSRYVNWIK

[chemical structure]

TSESATPESGPGSEPATSGSETPGTSESATPESGPGTSTEPSEGSAPGTSTEPSEGSAPGTSTEP
SEGSAPGTSTEPSEGSAPGTSTEPSEGSAPGTSTEPSEGSAPGSPAGSPTSTEEGTSTEPSEGSA
PGASS
SEQ ID NO: 118 N105-AE42 pJH44
MQRVNMIMAESPGLITICLLGYLLSAECTVFLDHENANKILNRPKRYNSGKLEEFVQGNLERECM
EEKCSFEEAREVFENTERTTEFWKQYVDGDQCESNPCLNGGSCKDDINSYECWCPFGFEGKNCEL
DVTCNIKNGRCEQFCKNSADNGAPGSPAGSPTSTEEGTSESATPESGPGSEPATSGSETPASSKV
VCSCTEGYRLAENQKSCEPAVPFPCGRVSVSQTSKLTRAETVFPDVDYVNSTEAETILDNITQST
QSFNDFTRVVGGEDAKPGQFPWQVVLNGKVDAFCGGSIVNEKWIVTAAHCVETGVKITVVAGEHN
IEETEHTEQKRNVIRIIPHHNYNAAINKYNHDIALLELDEPLVLNSYVTPICIADKEYTNIFLKF
GSGYVSGWGRVFHKGRSALVLQYLRVPLVDRATCLLSTKFTIYNNMFCAGFHEGGRDSCQGDSGG
PHVTEVEGTSFLTGIISWGEECAMKGKYGIYTKVSRYVNWIKEKTKLT
SEQ ID NO: 119 D166-AE72 pJH46
MQRVNMIMAESPGLITICLLGYLLSAECTVFLDHENANKILNRPKRYNSGKLEEFVQGNLERECM
EEKCSFEEAREVFENTERTTEFWKQYVDGDQCESNPCLNGGSCKDDINSYECWCPFGFEGKNCEL
DVTCNIKNGRCEQFCKNSADNKVVCSCTEGYRLAENQKSCEPAVPFPCGRVSVSQTSKLTRAETV
FPDVDYVNSTEAETILDGAPSPAGSPTSTEEGTSESATPESGPGSEPATSGSETPGTSESATPES
GPGTSTEPSEGSAPGTSTEPSEGSAPGASSNITQSTQSFNDFTRVVGGEDAKPGQFPWQVVLNGK
VDAFCGGSIVNEKWIVTAAHCVETGVKITVVAGEHNIEETEHTEQKRNVIRIIPHHNYNAAINKY
NHDIALLELDEPLVLNSYVTPICIADKEYTNIFLKFGSGYVSGWGRVFHKGRSALVLQYLRVPLV
DRATCLLSTKFTIYNNMFCAGFHEGGRDSCQGDSGGPHVIEVEGTSFLIGIISWGEECAMKGKYG
IYTKVSRYVNWIKEKTKLT
SEQ ID NO: 120 D166-AE144 pJH47
MQRVNMIMAESPGLITICLLGYLLSAECTVFLDHENANKILNRPKRYNSGKLEEPVQGNLERECM
EEKCSFEEAREVFENTERTTEFWKQYVDGDQCESNPCLNGGSCKDDINSYECWCPFGFEGKNCEL
DVTCNIKNGRCEQFCKNSADNKVVCSCTEGYRLAENQKSCEPAVPFPCGRVSVSQTSKLTRAETV
FPDVDYVNSTEAETILDGAPSPAGSPTSTEEGTSESATPESGPGSEPATSGSETPGTSESATPES
GPGTSTEPSEGSAPGTSTEPSEGSAPGTSTEPSEGSAPGTSTEPSEGSAPGTSTEPSEGSAPGTS
TEPSEGSAPGSPAGSPTSTEEGTSTEPSEGSAPGASSNITQSTQSFNDFIRVVGGEDAKPGQFPW
QVVLNGKVDAFCGGSIVNEKWIVTAAHCVETGVKITVVAGEHNIEETEHTEQKRNVIRIIPHHNY
NAAINKYNHDIALLELDEPLVLNSYVTPICIADKEYTNIFLKFGSGYVSGWGRVFHKGRSALVLQ
YLRVPLVDRATCLLSTKFTIYNNMFCAGFHEGGRDSCQGDSGGPHVTEVEGTSFLTGIISWGEEC
AMKGKYGIYTKVSRYVNWIKEKTKLT
SEQ ID NO: 121 C-Term-AE144 pJH50
MQRVNMIMAESPGLITICLLGYLLSAECTVFLDHENANKILNRPKRYNSGKLEEPVQGNLERECM
EEKCSFEEAREVFENTERTTEFWKQYVDGDQCESNPCLNGGSCKDDINSYECWCPFGFEGKNCEL
DVTCNIKNGRCEQFCKNSADNKVVCSCTEGYRLAENQKSCEPAVPFPCGRVSVSQTSKLTRAETV
FPDVDYVNSTEAETILDNITQSTQSFNDFIRVVGGEDAKPGQFPWQVVLNGKVDAFCGGSIVNEK
WIVTAAHCVETGVKITVVAGEHNIEETEHTEQKRNVIRIIPHHNYNAAINKYNHDIALLELDEPL
VLNSYVTPICIADKEYTNIFLKFGSGYVSGWGRVFHKGRSALVLQYLRVPLVDRATCLLSTKFTI
YNNMFCAGFHEGGRDSCQGDSGGPHVTEVEGTSFLTGIISWGEECAMKGKYGIYTKVSRYVNWIK

[chemical structure]

TSESATPESGPGTSESATPESGPGTSESATPESGPGSEPATSGSETPGSEPATSGSETPGSPAGS
PTSTEEGTSTEPSEGSAPGTSTEPSEGSAPGSEPATSGSETPGTSESATPESGPGTSTEPSEGSA
PGASS
SEQ ID NO: 122 C-Term-AE288 pJH51
MQRVNMIMAESPGLITICLLGYLLSAECTVFLDHENANKILNRPKRYNSGKLEEPVQGNLERECM
EEKCSFEEAREVFENTERTTEFWKQYVDGDQCESNPCLNGGSCKDDINSYECWCPFGFEGKNCEL
DVTCNIKNGRCEQFCKNSADNKVVCSCTEGYRLAENQKSCEPAVPFPCGRVSVSQTSKLTRAETV
FPDVDYVNSTEAETILDNITQSTQSFNDFIRVVGGEDAKPGQFPWQVVLNGKVDAFCGGSIVNEK
WIVTAAHCVETGVKITVVAGEHNIEETEHTEQKRNVIRIIPHHNYNAAINKYNHDIALLELDEPL
VLNSYVTPICIADKEYTNIFLKFGSGYVSGWGRVFHKGRSALVLQYLRVPLVDRATCLLSTKFTI
YNNMFCAGFHEGGRDSCQGDSGGPHVTEVEGTSFLTGIISWGEECAMKGKYGIYTKVSRYVNWIK

[chemical structure]

GSEPATSGSETPGTSESATPESGPGSEPATSGSETPGTSESATPESGPGTSTEPSEGSAPGSPAG
SPTSTEEGTSESATPESGPGSEPATSGSETPGTSESATPESGPGSPAGSPTSTEEGSPAGSPTST
EEGTSTEPSEGSAPGTSESATPESGPGTSESATPESGPGTSESATPESGPGSEPATSGSETPGSE
PATSGSETPGSPAGSPTSTEEGTSTEPSEGSAPGTSTEPSEGSAPGSEPATSGSETPGTSESATP
ESGPGTSTEPSEGSAPASS
SEQ ID NO: 123 C-Term-AE72 pJH52
MQRVNMIMAESPGLITICLLGYLLSAECTVFLDHENANKILNRPKRYNSGKLEEPVQGNLERECM
EEKCSFEEAREVFENTERTTEFWKQYVDGDQCESNPCLNGGSCKDDINSYECWCPFGFEGKNCEL
DVTCNIKNGRCEQFCKNSADNKVVCSCTEGYRLAENQKSCEPAVPFPCGRVSVSQTSKLTRAETV
FPDVDYVNSTEAETILDNITQSTQSFNDFTRVVGGEDAKPGQFPWQVVLNGKVDAFCGGSIVNEK
WIVTAAHCVETGVKITVVAGEHNIEETEHTEQKRNVIRIIPHHNYNAAINKYNHDIALLELDEPL
VLNSYVTPICIADKEYTNIFLKFGSGYVSGWGRVFHKGRSALVLQYLRVPLVDRATCLLSTKFTI
YNNMFCAGFHEGGRDSCQGDSGGPHVTEVEGTSFLTGIISWGEECAMKGKYGIYTKVSRYVNWIK

[chemical structure]

SEPATSGSETPGTSESATPESGPGSEPATSGSETPGTSESATPESGPGTSTEPSEGSAPGASS
SEQ ID NO: 124 E224-AE42 pJH54
MQRVNMIMAESPGLITICLLGYLLSAECTVFLDHENANKILNRPKRYNSGKLEEFVQGNLERECM
EEKCSFEEAREVFENTERTTEFWKQYVDGDQCESNPCLNGGSCKDDINSYECWCPFGFEGKNCEL
DVTCNIKNGRCEQFCKNSADNKVVCSCTEGYRLAENQKSCEPAVPFPCGRVSVSQTSKLTRAETV
FPDVDYVNSTEAETILDNITQSTQSFNDFTRVVGGEDAKPGQFPWQVVLNGKVDAFCGGSIVNEK
WIVTAAHCVEGAPGSPAGSPTSTEEGTSESATPESGPGSEPATSGSETPASSTGVKITVVAGEHN
IEETEHTEQKRNVIRIIPHHNYNAAINKYNHDIALLELDEPLVLNSYVTPICIADKEYTNIFLKF
GSGYVSGWGRVFHKGRSALVLQYLRVPLVDRATCLLSTKFTIYNNMFCAGFHEGGRDSCQGDSGG
PHVTEVEGTSFLTGIISWGEECAMKGKYGIYTKVSRYVNWIKEKTKLT
SEQ ID NO: 125 D166-AE42 pJH55
MQRVNMIMAESPGLITICLLGYLLSAECTVFLDHENANKILNRPKRYNSGKLEEFVQGNLERECM
EEKCSFEEAREVFENTERTTEFWKQYVDGDQCESNPCLNGGSCKDDINSYECWCPFGFEGKNCEL
DVTCNIKNGRCEQFCKNSADNKVVCSCTEGYRLAENQKSCEPAVPFPCGRVSVSQTSKLTRAETV
FPDVDYVNSTEAETILDGAPGSPAGSPTSTEEGTSESATPESGPGSEPATSGSETPASSNITQST
QSFNDFTRVVGGEDAKPGQFPWQVVLNGKVDAFCGGSIVNEKWIVTAAHCVETGVKITVVAGEHN
IEETEHTEQKRNVIRIIPHHNYNAAINKYNHDIALLELDEPLVLNSYVTPICIADKEYTNIFLKF
GSGYVSGWGRVFHKGRSALVLQYLRVPLVDRATCLLSTKFTIYNNMFCAGFHEGGRDSCQGDSGG
PHVTEVEGTSFLTGIISWGEECAMKGKYGIYTKVSRYVNWIKEKTKL
SEQ ID NO: 126 D166-AE42, C-Term-AE72 pJH59
MQRVNMIMAESPGLITICLLGYLLSAECTVFLDHENANKILNRPKRYNSGKLEEFVQGNLERECM
EEKCSFEEAREVFENTERTTEFWKQYVDGDQCESNPCLNGGSCKDDINSYECWCPFGFEGKNCEL
DVTCNIKNGRCEQFCKNSADNKVVCSCTEGYRLAENQKSCEPAVPFPCGRVSVSQTSKLTRAETV
FPDVDYVNSTEAETILDGAPGSPAGSPTSTEEGTSESATPESGPGSEPATSGSETPASSNITQST
QSFNDFTRVVGGEDAKPGQFPWQVVLNGKVDAFCGGSIVNEKWIVTAAHCVETGVKITVVAGEHN
IEETEHTEQKRNVIRIIPHHNYNAAINKYNHDIALLELDEPLVLNSYVTPICIADKEYTNIFLKF
GSGYVSGWGRVFHKGRSALVLQYLRVPLVDRATCLLSTKFTIYNNMFCAGFHEGGRDSCQGDSGG

[chemical structure]

[chemical structure]

GSEPATSGSETPGTSESATPESGPGTSTEPSEGSAPGAS
SEQ ID NO: 127 D166-AE42, C-Term-AE144 pJH60
MQRVNMIMAESPGLITICLLGYLLSAECTVFLDHENANKILNRPKRYNSGKLEEFVQGNLERECM
EEKCSFEEAREVFENTERTTEFWKQYVDGDQCESNPCLNGGSCKDDINSYECWCPFGFEGKNCEL
DVTCNIKNGRCEQFCKNSADNKVVCSCTEGYRLAENQKSCEPAVPFPCGRVSVSQTSKLTRAETV
FPDVDYVNSTEAETILDGAPGSPAGSPTSTEEGTSESATPESGPGSEPATSGSETPASSNITQST
QSFNDFTRVVGGEDAKPGQFPWQVVLNGKVDAFCGGSIVNEKWIVTAAHCVETGVKITVVAGEHN
IEETEHTEQKRNVIRIIPHHNYNAAINKYNHDIALLELDEPLVLNSYVTPICIADKEYTNIFLKF
GSGYVSGWGRVFHKGRSALVLQYLRVPLVDRATCLLSTKFTIYNNMFCAGFHEGGRDSCQGDSGG

[chemical structure]

[chemical structure]

GTSESATPESGPGTSTEPSEGSAPGTSTEPSEGSAPGTSTEPSEGSAPGTSTEPSEGSAPGTSTE
PSEGSAPGTSTEPSEGSAPGSPAGSPTSTEEGTSTEPSEGSAPGASS
SEQ ID NO: 128 D166-AE42, C-Term-AE288 pJH61
MQRVNMIMAESPGLITICLLGYLLSAECTVFLDHENANKILNRPKRYNSGKLEEFVQGNLERECM
EEKCSFEEAREVFENTERTTEFWKQYVDGDQCESNPCLNGGSCKDDINSYECWCPFGFEGKNCEL
DVTCNIKNGRCEQFCKNSADNKVVCSCTEGYRLAENQKSCEPAVPFPCGRVSVSQTSKLTRAETV
FPDVDYVNSTEAETILDGAPGSPAGSPTSTEEGTSESATPESGPGSEPATSGSETPASSNITQST
QSFNDFTRVVGGEDAKPGQFPWQVVLNGKVDAFCGGSIVNEKWIVTAAHCVETGVKITVVAGEHN
IEETEHTEQKRNVIRIIPHHNYNAAINKYNHDIALLELDEPLVLNSYVTPICIADKEYTNIFLKF
GSGYVSGWGRVFHKGRSALVLQYLRVPLVDRATCLLSTKFTIYNNMFCAGFHEGGRDSCQGDSGG

[chemical structure]

[chemical structure]

PGSEPATSGSETPGTSESATPESGPGTSTEPSEGSAPGSPAGSPTSTEEGTSESATPESGPGSEP
ATSGSETPGTSESATPESGPGSPAGSPTSTEEGSPAGSPTSTEEGTSTEPSEGSAPGTSESATPE
SGPGTSESATPESGPGTSESATPESGPGSEPATSGSETPGSEPATSGSETPGSPAGSPTSTEEGT
STEPSEGSAPGTSTEPSEGSAPGSEPATSGSETPGTSESATPESGPGTSTEPSEGSAPASS
SEQ ID NO: 129 D166-AE72, C-Term-AE72 pJH62
MQRVNMIMAESPGLITICLLGYLLSAECTVFLDHENANKILNRPKRYNSGKLEEFVQGNLERECM
EEKCSFEEAREVFENTERTTEFWKQYVDGDQCESNPCLNGGSCKDDINSYECWCPFGFEGKNCEL
DVTCNIKNGRCEQFCKNSADNKVVCSCTEGYRLAENQKSCEPAVPFPCGRVSVSQTSKLTRAETV
FPDVDYVNSTEAETILDGAPSPAGSPTSTEEGTSESATPESGPGSEPATSGSETPGTSESATPES
GPGTSTEPSEGSAPGTSTEPSEGSAPGASSNITQSTQSFNDFTRVVGGEDAKPGQFPWQVVLNGK
VDAFCGGSIVNEKWIVTAAHCVETGVKITVVAGEHNIEETEHTEQKRNVIRIIPHHNYNAAINKY
NHDIALLELDEPLVLNSYVTPICIADKEYTNIFLKFGSGYVSGWGRVFHKGRSALVLQYLRVPLV
DRATCLLSTKFTIYNNMFCAGFHEGGRDSCQGDSGGPHVIEVEGTSFLTGITSWGEECAMKGKYG

[chemical structure]

PTSESATPESGPGSEPATSGSETPGTSESATPESGPGSEPATSGSETPGTSESATPESGPGTSTE
PSEGSAPGASS
SEQ ID NO: 130 D166-AE72, C-Term-AE144 pJH63
MQRVNMIMAESPGLITICLLGYLLSAECTVFLDHENANKILNRPKRYNSGKLEEFVQGNLERECM
EEKCSFEEAREVFENTERTTEFWKQYVDGDQCESNPCLNGGSCKDDINSYECWCPFGFEGKNCEL
DVTCNIKNGRCEQFCKNSADNKVVCSCTEGYRLAENQKSCEPAVPFPCGRVSVSQTSKLTRAETV
FPDVDYVNSTEAETILDGAPSPAGSPTSTEEGTSESATPESGPGSEPATSGSETPGTSESATPES
GPGTSTEPSEGSAPGTSTEPSEGSAPGASSNITQSTQSFNDFTRVVGGEDAKPGQFPWQVVLNGK
VDAFCGGSIVNEKWIVTAAHCVETGVKITVVAGEHNIEETEHTEQKRNVIRIIPHHNYNAAINKY
NHDIALLELDEPLVLNSYVTPICIADKEYTNIFLKFGSGYVSGWGRVFHKGRSALVLQYLRVPLV
DRATCLLSTKFTIYNNMFCAGFHEGGRDSCQGDSGGPHVIEVEGTSFLTGITSWGEECAMKGKYG

[chemical structure]

PSPAGSPTSTEEGTSESATPESGPGSEPATSGSETPGTSESATPESGPGTSTEPSEGSAPGTSTE
PSEGSAPGTSTEPSEGSAPGTSTEPSEGSAPGTSTEPSEGSAPGTSTEPSEGSAPGSPAGSPTST
EEGTSTEPSEGSAPGASS
SEQ ID NO: 131 D166-AE72, C-Term-AE288 pJH64
MQRVNMIMAESPGLITICLLGYLLSAECTVFLDHENANKILNRPKRYNSGKLEEFVQGNLERECM
EEKCSFEEAREVFENTERTTEFWKQYVDGDQCESNPCLNGGSCKDDINSYECWCPFGFEGKNCEL
DVTCNIKNGRCEQFCKNSADNKVVCSCTEGYRLAENQKSCEPAVPFPCGRVSVSQTSKLTRAETV
FPDVDYVNSTEAETILDGAPSPAGSPTSTEEGTSESATPESGPGSEPATSGSETPGTSESATPES
GPGTSTEPSEGSAPGTSTEPSEGSAPGASSNITQSTQSFNDFTRVVGGEDAKPGQFPWQVVLNGK
VDAFCGGSIVNEKWIVTAAHCVETGVKITVVAGEHNIEETEHTEQKRNVIRIIPHHNYNAAINKY
NHDIALLELDEPLVLNSYVTPICIADKEYTNIFLKFGSGYVSGWGRVFHKGRSALVLQYLRVPLV
DRATCLLSTKFTIYNNMFCAGFHEGGRDSCQGDSGGPHVIEVEGTSFLTGITSWGEECAMKGKYG

[chemical structure]

PGTSESATPESGPGSEPATSGSETPGTSESATPESGPGSEPATSGSETPGTSESATPESGPGTST
EPSEGSAPGSPAGSPTSTEEGTSESATPESGPGSEPATSGSETPGTSESATPESGPGSPAGSPTS
TEEGSPAGSPTSTEEGTSTEPSEGSAPGTSESATPESGPGTSESATPESGPGTSESATPESGPGS
EPATSGSETPGSEPATSGSETPGSPAGSPTSTEEGTSTEPSEGSAPGTSTEPSEGSAPGSEPATS
GSETPGTSESATPESGPGTSTEPSEGSAPASS
SEQ ID NO: 132 D166-AE144, C-Term-AE72 pJH65
MQRVNMIMAESPGLITICLLGYLLSAECTVFLDHENANKILNRPKRYNSGKLEEFVQGNLERECM
EEKCSFEEAREVFENTERTTEFWKQYVDGDQCESNPCLNGGSCKDDINSYECWCPFGFEGKNCEL
DVTCNIKNGRCEQFCKNSADNKVVCSCTEGYRLAENQKSCEPAVPFPCGRVSVSQTSKLTRAETV
FPDVDYVNSTEAETILDGAPSPAGSPTSTEEGTSESATPESGPGSEPATSGSETPGTSESATPES
GPGTSTEPSEGSAPGTSTEPSEGSAPGTSTEPSEGSAPGTSTEPSEGSAPGTSTEPSEGSAPGTS
TEPSEGSAPGSPAGSPTSTEEGTSTEPSEGSAPGASSNITQSTQSFNDFTRVVGGEDAKPGQFPW
QVVLNGKVDAFCGGSIVNEKWIVTAAHCVETGVKITVVAGEHNIEETEHTEQKRNVIRIIPHHNY
NAAINKYNHDIALLELDEPLVLNSYVTPICIADKEYTNIFLKFGSGYVSGWGRVFHKGRSALVLQ
YLRVPLVDRATCLLSTKFTIYNNMFCAGFHEGGRDSCQGDSGGPHVIEVEGTSFLTGITSWGEEC

[chemical structure]

[chemical structure]

GPGTSTEPSEGSAPGASS
SEQ ID NO: 133 D166-AE144, C-Term-AE144 pJH66
MQRVNMIMAESPGLITICLLGYLLSAECTVFLDHENANKILNRPKRYNSGKLEEFVQGNLERECM
EEKCSFEEAREVFENTERTTEFWKQYVDGDQCESNPCLNGGSCKDDINSYECWCPFGFEGKNCEL
DVTCNIKNGRCEQFCKNSADNKVVCSCTEGYRLAENQKSCEPAVPFPCGRVSVSQTSKLTRAETV
FPDVDYVNSTEAETILDGAPSPAGSPTSTEEGTSESATPESGPGSEPATSGSETPGTSESATPES
GPGTSTEPSEGSAPGTSTEPSEGSAPGTSTEPSEGSAPGTSTEPSEGSAPGTSTEPSEGSAPGTS
TEPSEGSAPGSPAGSPTSTEEGTSTEPSEGSAPGASSNITQSTQSFNDFTRVVGGEDAKPGQFPW
QVVLNGKVDAFCGGSIVNEKWIVTAAHCVETGVKITVVAGEHNIEETEHTEQKRNVIRIIPHHNY
NAAINKYNHDIALLELDEPLVLNSYVTPICIADKEYTNIFLKFGSGYVSGWGRVFHKGRSALVLQ
YLRVPLVDRATCLLSTKFTIYNNMFCAGFHEGGRDSCQGDSGGPHVIEVEGTSFLTGITSWGEEC

[chemical structure]

[chemical structure]

APGTSTEPSEGSAPGTSTEPSEGSAPGTSTEPSEGSAPGTSTEPSEGSAPGTSTEPSEGSAPGSP
AGSPTSTEEGTSTEPSEGSAPGASS
SEQ ID NO: 134 D166-AE144, C-Term-AE288 pJH67
MQRVNMIMAESPGLITICLLGYLLSAECTVFLDHENANKILNRPKRYNSGKLEEFVQGNLERECM
EEKCSFEEAREVFENTERTTEFWKQYVDGDQCESNPCLNGGSCKDDINSYECWCPFGFEGKNCEL
DVTCNIKNGRCEQFCKNSADNKVVCSCTEGYRLAENQKSCEPAVPFPCGRVSVSQTSKLTRAETV
FPDVDYVNSTEAETILDGAPSPAGSPTSTEEGTSESATPESGPGSEPATSGSETPGTSESATPES
GPGTSTEPSEGSAPGTSTEPSEGSAPGTSTEPSEGSAPGTSTEPSEGSAPGTSTEPSEGSAPGTS
TEPSEGSAPGSPAGSPTSTEEGTSTEPSEGSAPGASSNITQSTQSFNDFTRVVGGEDAKPGQFPW
QVVLNGKVDAFCGGSIVNEKWIVTAAHCVETGVKITVVAGEHNIEETEHTEQKRNVIRIIPHHNY
NAAINKYNHDIALLELDEPLVLNSYVTPICIADKEYTNIFLKFGSGYVSGWGRVFHKGRSALVLQ
YLRVPLVDRATCLLSTKFTIYNNMFCAGFHEGGRDSCQGDSGGPHVTEVEGTSFLTGIISWGEEC

[chemical structure]

[chemical structure]

SGPGTSTEPSEGSAPGSPAGSPTSTEEGTSESATPESGPGSEPATSGSETPGTSESATPESGPGS
PAGSPTSTEEGSPAGSPTSTEEGTSTEPSEGSAPGTSESATPESGPGTSESATPESGPGTSESAT
PESGPGSEPATSGSETPGSEPATSGSETPGSPAGSPTSTEEGTSTEPSEGSAPGTSTEPSEGSAP
GSEPATSGSETPGTSESATPESGPGTSTEPSEGSAPASS
SEQ ID NO: 135 N105-AE42, D166-AE42 pJH68
MQRVNMIMAESPGLITICLLGYLLSAECTVFLDHENANKILNRPKRYNSGKLEEFVQGNLERECM
EEKCSFEEAREVFENTERTTEFWKQYVDGDQCESNPCLNGGSCKDDINSYECWCPFGFEGKNCEL
DVTCNIKNGRCEQFCKNSADNGAPGSPAGSPTSTEEGTSESATPESGPGSEPATSGSETPASSKV
VCSCTEGYRLAENQKSCEPAVPFPCGRVSVSQTSKLTRAETVFPDVDYVNSTEAETILDGAPGSP
AGSPTSTEEGTSESATPESGPGSEPATSGSETPASSNITQSTQSFNDFTRVVGGEDAKPGQFPWQ
VVLNGKVDAFCGGSIVNEKWIVTAAHCVETGVKITVVAGEHNIEETEHTEQKRNVIRIIPHHNYN
AAINKYNHDIALLELDEPLVLNSYVTPICIADKEYTNIFLKFGSGYVSGWGRVFHKGRSALVLQY
LRVPLVDRATCLLSTKFTIYNNMFCAGFHEGGRDSCQGDSGGPHVTEVEGTSFLTGIISWGEECA
MKGKYGIYTKVSRYVNWIKEKTKLT
SEQ ID NO: 136 N105-AE42, D166-AE72 pJH69
MQRVNMIMAESPGLITICLLGYLLSAECTVFLDHENANKILNRPKRYNSGKLEEFVQGNLERECM
EEKCSFEEAREVFENTERTTEFWKQYVDGDQCESNPCLNGGSCKDDINSYECWCPFGFEGKNCEL
DVTCNIKNGRCEQFCKNSADNGAPGSPAGSPTSTEEGTSESATPESGPGSEPATSGSETPASSKV
VCSCTEGYRLAENQKSCEPAVPFPCGRVSVSQTSKLTRAETVFPDVDYVNSTEAETILDGAPSPA
GSPTSTEEGTSESATPESGPGSEPATSGSETPGTSESATPESGPGTSTEPSEGSAPGTSTEPSEG
SAPGASSNITQSTQSFNDFTRVVGGEDAKPGQFPWQVVLNGKVDAFCGGSIVNEKWIVTAAHCVE
TGVKITVVAGEHNIEETEHTEQKRNVIRIIPHHNYNAAINKYNHDIALLELDEPLVLNSYVTPIC
IADKEYTNIFLKFGSGYVSGWGRVFHKGRSALVLQYLRVPLVDRATCLLSTKFTIYNNMFCAGFH
EGGRDSCQGDSGGPHVTEVEGTSFLTGIISWGEECAMKGKYGIYTKVSRYVNWIKEKTKLT
SEQ ID NO: 137 N105-AE42, D166-AE144 pJH70
MQRVNMIMAESPGLITICLLGYLLSAECTVFLDHENANKILNRPKRYNSGKLEEFVQGNLERECM
EEKCSFEEAREVFENTERTTEFWKQYVDGDQCESNPCLNGGSCKDDINSYECWCPFGFEGKNCEL
DVTCNIKNGRCEQFCKNSADNGAPGSPAGSPTSTEEGTSESATPESGPGSEPATSGSETPASSKV
VCSCTEGYRLAENQKSCEPAVPFPCGRVSVSQTSKLTRAETVFPDVDYVNSTEAETILDGAPSPA
GSPTSTEEGTSESATPESGPGSEPATSGSETPGTSESATPESGPGTSTEPSEGSAPGTSTEPSEG
SAPGTSTEPSEGSAPGTSTEPSEGSAPGTSTEPSEGSAPGTSTEPSEGSAPGSPAGSPTSTEEGT
STEPSEGSAPGASSNITQSTQSFNDFTRVVGGEDAKPGQFPWQVVLNGKVDAFCGGSIVNEKWIV
TAAHCVETGVKITVVAGEHNIEETEHTEQKRNVIRIIPHHNYNAAINKYNHDIALLELDEPLVLN
SYVTPICIADKEYTNIFLKFGSGYVSGWGRVFHKGRSALVLQYLRVPLVDRATCLLSTKFTIYNN
MFCAGFHEGGRDSCQGDSGGPHVTEVEGTSFLTGIISWGEECAMKGKYGIYTKVSRYVNWIKEKT
KLT
SEQ ID NO: 138 N105-AE42, C-Term-AE72 pJH71
MQRVNMIMAESPGLITICLLGYLLSAECTVFLDHENANKILNRPKRYNSGKLEEFVQGNL
ERECMEEKCSFEEAREVFENTERTTEFWKQYVDGDQCESNPCLNGGSCKDDINSYECWCPFGFEG
KNCELDVTCNIKNGRCEQFCKNSADNGAPGSPAGSPTSTEEGTSESATPESGPGSEPATSGSETP
ASSKVVCSCTEGYRLAENQKSCEPAVPFPCGRVSVSQTSKLTRAETVFPDVDYVNSTEAETILDN
ITQSTQSFNDFTRVVGGEDAKPGQFPWQVVLNGKVDAFCGGSIVNEKWIVTAAHCVETGVKITVV
AGEHNIEETEHTEQKRNVIRIIPHHNYNAAINKYNHDIALLELDEPLVLNSYVTPICIADKEYTN
IFLKFGSGYVSGWGRVFHKGRSALVLQYLRVPLVDRATCLLSTKFTIYNNMFCAGFHEGGRDSCQ

[chemical structure]

[chemical structure]

PESGPGSEPATSGSETPGTSESATPESGPGTSTEPSEGSAPGASS
SEQ ID NO: 139 N105-AE42, C-Term-AE144 pJH72
MQRVNMIMAESPGLITICLLGYLLSAECTVFLDHENANKILNRPKRYNSGKLEEFVQGNLERECM
EEKCSFEEAREVFENTERTTEFWKQYVDGDQCESNPCLNGGSCKDDINSYECWCPFGFEGKNCEL
DVTCNIKNGRCEQFCKNSADNGAPGSPAGSPTSTEEGTSESATPESGPGSEPATSGSETPASSKV
VCSCTEGYRLAENQKSCEPAVPFPCGRVSVSQTSKLTRAETVFPDVDYVNSTEAETILDNITQST
QSFNDFTRVVGGEDAKPGQFPWQVVLNGKVDAFCGGSIVNEKWIVTAAHCVETGVKITVVAGEHN
IEETEHTEQKRNVIRIIPHHNYNAAINKYNHDIALLELDEPLVLNSYVTPICIADKEYTNIFLKF
GSGYVSGWGRVFHKGRSALVLQYLRVPLVDRATCLLSTKFTIYNNMFCAGFHEGGRDSCQGDSGG

[chemical structure]

[chemical structure]

GTSESATPESGPGTSTEPSEGSAPGTSTEPSEGSAPGTSTEPSEGSAPGTSTEPSEGSAPGTSTE
PSEGSAPGTSTEPSEGSAPGSPAGSPTSTEEGTSTEPSEGSAPGASS
SEQ ID NO: 140 N105-AE42, C-Term-AE288 pJH73
MQRVNMIMAESPGLITICLLGYLLSAECTVFLDHENANKILNRPKRYNSGKLEEFVQGNLERECM
EEKCSFEEAREVFENTERTTEFWKQYVDGDQCESNPCLNGGSCKDDINSYECWCPFGFEGKNCEL
DVTCNIKNGRCEQFCKNSADNGAPGSPAGSPTSTEEGTSESATPESGPGSEPATSGSETPASSKV
VCSCTEGYRLAENQKSCEPAVPFPCGRVSVSQTSKLTRAETVFPDVDYVNSTEAETILDNITQST
QSFNDFTRVVGGEDAKPGQFPWQVVLNGKVDAFCGGSIVNEKWIVTAAHCVETGVKITVVAGEHN
IEETEHTEQKRNVIRIIPHHNYNAAINKYNHDIALLELDEPLVLNSYVTPICIADKEYTNIFLKF
GSGYVSGWGRVFHKGRSALVLQYLRVPLVDRATCLLSTKFTIYNNMFCAGFHEGGRDSCQGDSGG

[chemical structure]

[chemical structure]

PGSEPATSGSETPGTSESATPESGPGTSTEPSEGSAPGSPAGSPTSTEEGTSESATPESGPGSEP
ATSGSETPGTSESATPESGPGSPAGSPTSTEEGSPAGSPTSTEEGTSTEPSEGSAPGTSESATPE
SGPGTSESATPESGPGTSESATPESGPGSEPATSGSETPGSEPATSGSETPGSPAGSPTSTEEGT
STEPSEGSAPGTSTEPSEGSAPGSEPATSGSETPGTSESATPESGPGTSTEPSEGSAPASS
SEQ ID NO: 141 N105-AE42, E224-AE42 pJH74
MQRVNMIMAESPGLITICLLGYLLSAECTVFLDHENANKILNRPKRYNSGKLEEFVQGNLERECM
EEKCSFEEAREVFENTERTTEFWKQYVDGDQCESNPCLNGGSCKDDINSYECWCPFGFEGKNCEL
DVTCNIKNGRCEQFCKNSADNGAPGSPAGSPTSTEEGTSESATPESGPGSEPATSGSETPASSKV
VCSCTEGYRLAENQKSCEPAVPFPCGRVSVSQTSKLTRAETVFPDVDYVNSTEAETILDNITQST
QSFNDFTRVVGGEDAKPGQFPWQVVLNGKVDAFCGGSIVNEKWIVTAAHCVEGAPGSPAGSPTST
EEGTSESATPESGPGSEPATSGSETPASSTGVKITVVAGEHNIEETEHTEQKRNVIRIIPHHNYN
AAINKYNHDIALLELDEPLVLNSYVTPICIADKEYTNIFLKFGSGYVSGWGRVFHKGRSALVLQY
LRVPLVDRATCLLSTKFTIYNNMFCAGFHEGGRDSCQGDSGGPHVTEVEGTSFLTGIISWGEECA
MKGKYGIYTKVSRYVNWIKEKTKLT
SEQ ID NO: 142 D166-AE42, E224-AE42 pJH75
MQRVNMIMAESPGLITICLLGYLLSAECTVFLDHENANKILNRPKRYNSGKLEEFVQGNLERECM
EEKCSFEEAREVFENTERTTEFWKQYVDGDQCESNPCLNGGSCKDDINSYECWCPFGFEGKNCEL
DVTCNIKNGRCEQFCKNSADNKVVCSCTEGYRLAENQKSCEPAVPFPCGRVSVSQTSKLTRAETV
FPDVDYVNSTEAETILDGAPGSPAGSPTSTEEGTSESATPESGPGSEPATSGSETPASSNITQST
QSFNDFTRVVGGEDAKPGQFPWQVVLNGKVDAFCGGSIVNEKWIVTAAHCVEGAPGSPAGSPTST
EEGTSESATPESGPGSEPATSGSETPASSIGVKITVVAGEHNIEETEHTEQKRNVIRIIPHHNYN
AAINKYNHDIALLELDEPLVLNSYVTPICIADKEYTNIFLKFGSGYVSGWGRVFHKGRSALVLQY
LRVPLVDRATCLLSTKFTIYNNMFCAGFHEGGRDSCQGDSGGPHVTEVEGTSFLTGIISWGEECA
MKGKYGIYTKVSRYVNWIKEKTKLT
SEQ ID NO: 143 D166-AE72, E224-AE42 pJH76
MQRVNMIMAESPGLITICLLGYLLSAECTVFLDHENANKILNRPKRYNSGKLEEFVQGNLERECM
EEKCSFEEAREVFENTERTTEFWKQYVDGDQCESNPCLNGGSCKDDINSYECWCPFGFEGKNCEL
DVTCNIKNGRCEQFCKNSADNKVVCSCTEGYRLAENQKSCEPAVPFPCGRVSVSQTSKLTRAETV
FPDVDYVNSTEAETILDGAPSPAGSPTSTEEGTSESATPESGPGSEPATSGSETPGTSESATPES
GPGTSTEPSEGSAPGTSTEPSEGSAPGASSNITQSTQSFNDFIRVVGGEDAKPGQFPWQVVLNGK
VDAFCGGSIVNEKWIVTAAHCVEGAPGSPAGSPTSTEEGTSESATPESGPGSEPATSGSETPASS
TGVKITVVAGEHNIEETEHTEQKRNVIRIIPHHNYNAAINKYNHDIALLELDEPLVLNSYVTPIC
IADKEYTNIFLKFGSGYVSGWGRVFHKGRSALVLQYLRVPLVDRATCLLSTKFTIYNNMFCAGFH
EGGRDSCQGDSGGPHVTEVEGTSFLTGIISWGEECAMKGKYGIYTKVSRYVNWIKEKTKLT
SEQ ID NO: 144 D166-AE144, E224-AE42 pJH77
MEEKCSFEEAREVFENTERTTEFWKQYVDGDQCESNPCLNGGSCKDDINSYECWCPFGFEGKNCE
LDVTCNIKNGRCEQFCKNSADNKVVCSCTEGYRLAENQKSCEPAVPFPCGRVSVSQTSKLTRAET
VFPDVDYVNSTEAETILDGAPSPAGSPTSTEEGTSESATPESGPGSEPATSGSETPGTSESATPE
SGPGTSTEPSEGSAPGTSTEPSEGSAPGTSTEPSEGSAPGTSTEPSEGSAPGTSTEPSEGSAPGT
STEPSEGSAPGSPAGSPTSTEEGTSTEPSEGSAPGASSNITQSTQSFNDFIRVVGGEDAKPGQFP
WQVVLNGKVDAFCGGSIVNEKWIVTAAHCVEGAPGSPAGSPTSTEEGTSESATPESGPGSEPATS
GSETPASSTGVKITVVAGEHNIEETEHTEQKRNVIRIIPHHNYNAAINKYNHDIALLELDEPLVL
NSYVTPICIADKEYTNIFLKFGSGYVSGWGRVFHKGRSALVLQYLRVPLVDRATCLLSTKFTIYN
NMFCAGFHEGGRDSCQGDSGGPHVTEVEGTSFLTGIISWGEECAMKGKYGIYTKVSRYVNWIKEK
TKLT
SEQ ID NO: 145 E224-AE42, C-Term-AE72 pJH78
MQRVNMIMAESPGLITICLLGYLLSAECTVFLDHENANKILNRPKRYNSGKLEEFVQGNLERECM
EEKCSFEEAREVFENTERTTEFWKQYVDGDQCESNPCLNGGSCKDDINSYECWCPFGFEGKNCEL
DVTCNIKNGRCEQFCKNSADNKVVCSCTEGYRLAENQKSCEPAVPFPCGRVSVSQTSKLTRAETV
FPDVDYVNSTEAETILDNITQSTQSFNDFTRVVGGEDAKPGQFPWQVVLNGKVDAFCGGSIVNEK
WIVTAAHCVEGAPGSPAGSPTSTEEGTSESATPESGPGSEPATSGSETPASSIGVKITVVAGEHN
IEETEHTEQKRNVIRIIPHHNYNAAINKYNHDIALLELDEPLVLNSYVTPICIADKEYTNIFLKF
GSGYVSGWGRVFHKGRSALVLQYLRVPLVDRATCLLSTKFTIYNNMFCAGFHEGGRDSCQGDSGG

[chemical structure]

[chemical structure]

GSEPATSGSETPGTSESATPESGPGTSTEPSEGSAPGASS
SEQ ID NO: 146 E224-AE42, C-Term-AE144 pJH79
MQRVNMIMAESPGLITICLLGYLLSAECTVFLDHENANKILNRPKRYNSGKLEEFVQGNLERECM
EEKCSFEEAREVFENTERTTEFWKQYVDGDQCESNPCLNGGSCKDDINSYECWCPFGFEGKNCEL
DVTCNIKNGRCEQFCKNSADNKVVCSCTEGYRLAENQKSCEPAVPFPCGRVSVSQTSKLTRAETV
FPDVDYVNSTEAETILDNITQSTQSFNDFTRVVGGEDAKPGQFPWQVVLNGKVDAFCGGSIVNEK
WIVTAAHCVEGAPGSPAGSPTSTEEGTSESATPESGPGSEPATSGSETPASSTGVKITVVAGEHN
IEETEHTEQKRNVIRIIPHHNYNAAINKYNHDIALLELDEPLVLNSYVTPICIADKEYTNIFLKF
GSGYVSGWGRVFHKGRSALVLQYLRVPLVDRATCLLSTKFTIYNNMFCAGFHEGGRDSCQGDSGG

[chemical structure]

[chemical structure]

GTSESATPESGPGTSTEPSEGSAPGTSTEPSEGSAPGTSTEPSEGSAPGTSTEPSEGSAPGTSTE
PSEGSAPGTSTEPSEGSAPGSPAGSPTSTEEGTSTEPSEGSAPGASS
SEQ ID NO: 147 E224-AE42, C-Term-AE288 pJH80
MQRVNMIMAESPGLITICLLGYLLSAECTVFLDHENANKILNRPKRYNSGKLEEFVQGNLERECM
EEKCSFEEAREVFENTERTTEFWKQYVDGDQCESNPCLNGGSCKDDINSYECWCPFGFEGKNCEL
DVTCNIKNGRCEQFCKNSADNKVVCSCTEGYRLAENQKSCEPAVPFPCGRVSVSQTSKLTRAETV
FPDVDYVNSTEAETILDNITQSTQSFNDFTRVVGGEDAKPGQFPWQVVLNGKVDAFCGGSIVNEK
WIVTAAHCVEGAPGSPAGSPTSTEEGTSESATPESGPGSEPATSGSETPASSTGVKITVVAGEHN
IEETEHTEQKRNVIRIIPHHNYNAAINKYNHDIALLELDEPLVLNSYVTPICIADKEYTNIFLKF
GSGYVSGWGRVFHKGRSALVLQYLRVPLVDRATCLLSTKFTIYNNMFCAGFHEGGRDSCQGDSGG

[chemical structure]

[chemical structure]

PGSEPATSGSETPGTSESATPESGPGTSTEPSEGSAPGSPAGSPTSTEEGTSESATPESGPGSEP
ATSGSETPGTSESATPESGPGSPAGSPTSTEEGSPAGSPTSTEEGTSTEPSEGSAPGTSESATPE
SGPGTSESATPESGPGTSESATPESGPGSEPATSGSETPGSEPATSGSETPGSPAGSPTSTEEGT
STEPSEGSAPGTSTEPSEGSAPGSEPATSGSETPGTSESATPESGPGTSTEPSEGSAPASS
SEQ ID NO: 148 N105-AE42, C-Term-Fc pJH81
MQRVNMIMAESPGLITICLLGYLLSAECTVFLDHENANKILNRPKRYNSGKLEEFVQGNLERECM
EEKCSFEEAREVFENTERTTEFWKQYVDGDQCESNPCLNGGSCKDDINSYECWCPFGFEGKNCEL
DVTCNIKNGRCEQFCKNSADNGAPGSPAGSPTSTEEGTSESATPESGPGSEPATSGSETPASSKV
VCSCTEGYRLAENQKSCEPAVPFPCGRVSVSQTSKLTRAETVFPDVDYVNSTEAETILDNITQST
QSFNDFTRVVGGEDAKPGQFPWQVVLNGKVDAFCGGSIVNEKWIVTAAHCVETGVKITVVAGEHN
IEETEHTEQKRNVIRIIPHHNYNAAINKYNHDIALLELDEPLVLNSYVTPICIADKEYTNIFLKF
GSGYVSGWGRVFHKGRSALVLQYLRVPLVDRATCLLSTKFTIYNNMFCAGFHEGGRDSCQGDSGG
PHVTEVEGTSFLTGIISWGEECAMKGKYGIYTKVSRYVNWIKEKTKLTDKTHTCPPCPAPELLGG
PSVFLFPPKPKDTLMISRTPEVTCVVVDVSHEDPEVKFNWYVDGVEVHNAKTKPREEQYNSTYRV
VSVLTVLHQDWLNGKEYKCKVSNKALPAPIEKTISKAKGQPREPQVYTLPPSRDELTKNQVSLTC
LVKGFYPSDIAVEWESNGQPENNYKTTPPVLDSDGSFFLYSKLTVDKSRWQQGNVFSCSVMHEAL

[chemical structure]

LMISRTPEVTCVVVDVSHEDPEVKFNWYVDGVEVHNAKTKPREEQYNSTYRVVSVLTVLHQDWLN
GKEYKCKVSNKALPAPIEKTISKAKGQPREPQVYTLPPSRDELTKNQVSLTCLVKGFYPSDIAVE
WESNGQPENNYKTTPPVLDSDGSFELYSKLTVDKSRWQQGNVESCSVMHEALHNHYTQKSLSLSP
GK
SEQ ID NO: 149 E224-AE42, C-Term-Fc pJH82
MQRVNMIMAESPGLITICLLGYLLSAECTVFLDHENANKILNRPKRYNSGKLEEFVQGNLERECM
EEKCSFEEAREVFENTERTTEFWKQYVDGDQCESNPCLNGGSCKDDINSYECWCPFGFEGKNCEL
DVTCNIKNGRCEQFCKNSADNKVVCSCTEGYRLAENQKSCEPAVPFPCGRVSVSQTSKLTRAETV
FPDVDYVNSTEAETILDNITQSTQSFNDFTRVVGGEDAKPGQFPWQVVLNGKVDAFCGGSIVNEK
WIVTAAHCVEGAPGSPAGSPTSTEEGTSESATPESGPGSEPATSGSETPASSTGVKITVVAGEHN
IEETEHTEQKRNVIRIIPHHNYNAAINKYNHDIALLELDEPLVLNSYVTPICIADKEYTNIFLKF
GSGYVSGWGRVFHKGRSALVLQYLRVPLVDRATCLLSTKFTIYNNMFCAGFHEGGRDSCQGDSGG
PHVTEVEGTSFLTGIISWGEECAMKGKYGIYTKVSRYVNWIKEKTKLTDKTHTCPPCPAPELLGG
PSVFLFPPKPKDTLMISRTPEVTCVVVDVSHEDPEVKFNWYVDGVEVHNAKTKPREEQYNSTYRV
VSVLTVLHQDWLNGKEYKCKVSNKALPAPIEKTISKAKGQPREPQVYTLPPSRDELTKNQVSLTC
LVKGFYPSDIAVEWESNGQPENNYKTTPPVLDSDGSFFLYSKLTVDKSRWQQGNVFSCSVMHEAL

[chemical structure]

LMISRTPEVTCVVVDVSHEDPEVKFNWYVDGVEVHNAKTKPREEQYNSTYRVVSVLTVLHQDWLN
GKEYKCKVSNKALPAPIEKTISKAKGQPREPQVYTLPPSRDELTKNQVSLTCLVKGFYPSDIAVE
WESNGQPENNYKTTPPVLDSDGSFFLYSKLTVDKSRWQQGNVFSCSVMHEALHNHYTQKSLSLSP
GK
SEQ ID NO: 150 D166-AE42, C-Term-Fc pJH83
MQRVNMIMAESPGLITICLLGYLLSAECTVFLDHENANKILNRPKRYNSGKLEEFVQGNLERECM
EEKCSFEEAREVFENTERTTEFWKQYVDGDQCESNPCLNGGSCKDDINSYECWCPFGFEGKNCEL
DVTCNIKNGRCEQFCKNSADNKVVCSCTEGYRLAENQKSCEPAVPFPCGRVSVSQTSKLTRAETV
FPDVDYVNSTEAETILDGAPGSPAGSPTSTEEGTSESATPESGPGSEPATSGSETPASSNITQST
QSFNDFTRVVGGEDAKPGQFPWQVVLNGKVDAFCGGSIVNEKWIVTAAHCVETGVKITVVAGEHN
IEETEHTEQKRNVIRIIPHHNYNAAINKYNHDIALLELDEPLVLNSYVTPICIADKEYTNIFLKF
GSGYVSGWGRVFHKGRSALVLQYLRVPLVDRATCLLSTKFTIYNNMFCAGFHEGGRDSCQGDSGG
PHVTEVEGTSFLTGIISWGEECAMKGKYGIYTKVSRYVNWIKEKTKLTDKTHTCPPCPAPELLGG
PSVFLFPPKPKDTLMISRTPEVTCVVVDVSHEDPEVKFNWYVDGVEVHNAKTKPREEQYNSTYRV
VSVLTVLHQDWLNGKEYKCKVSNKALPAPIEKTISKAKGQPREPQVYTLPPSRDELTKNQVSLTC
LVKGFYPSDIAVEWESNGQPENNYKTTPPVLDSDGSFFLYSKLTVDKSRWQQGNVFSCSVMHEAL

[chemical structure]

LMISRTPEVTCVVVDVSHEDPEVKFNWYVDGVEVHNAKTKPREEQYNSTYRVVSVLTVLHQDWLN
GKEYKCKVSNKALPAPIEKTISKAKGQPREPQVYTLPPSRDELTKNQVSLTCLVKGFYPSDIAVE
WESNGQPENNYKTTPPVLDSDGSFFLYSKLTVDKSRWQQGNVFSCSVMHEALHNHYTQKSLSLSP
GK
SEQ ID NO: 151 D166-AE72, C-Term-Fc pJH84
MQRVNMIMAESPGLITICLLGYLLSAECTVFLDHENANKILNRPKRYNSGKLEEFVQGNLERECM
EEKCSFEEAREVFENTERTTEFWKQYVDGDQCESNPCLNGGSCKDDINSYECWCPFGFEGKNCEL
DVTCNIKNGRCEQFCKNSADNKVVCSCTEGYRLAENQKSCEPAVPFPCGRVSVSQTSKLTRAETV
FPDVDYVNSTEAETILDGAPSPAGSPTSTEEGTSESATPESGPGSEPATSGSETPGTSESATPES
GPGTSTEPSEGSAPGTSTEPSEGSAPGASSNITQSTQSFNDFTRVVGGEDAKPGQFPWQVVLNGK
VDAFCGGSIVNEKWIVTAAHCVETGVKITVVAGEHNIEETEHTEQKRNVIRIIPHHNYNAAINKY
NHDIALLELDEPLVLNSYVTPICIADKEYTNIFLKFGSGYVSGWGRVFHKGRSALVLQYLRVPLV
DRATCLLSTKFTIYNNMFCAGFHEGGRDSCQGDSGGPHVTEVEGTSFLTGIISWGEECAMKGKYG
IYTKVSRYVNWIKEKTKLTDKTHTCPPCPAPELLGGPSVFLFPPKPKDTLMISRTPEVTCVVVDV
SHEDPEVKFNWYVDGVEVHNAKTKPREEQYNSTYRVVSVLTVLHQDWLNGKEYKCKVSNKALPAP
IEKTISKAKGQPREPQVYTLPPSRDELTKNQVSLTCLVKGFYPSDIAVEWESNGQPENNYKTTPP

[chemical structure]

[chemical structure]

DGVEVHNAKTKPREEQYNSTYRVVSVLTVLHQDWLNGKEYKCKVSNKALPAPIEKTISKAKGQPR
EPQVYTLPPSRDELTKNQVSLTCLVKGFYPSDIAVEWESNGQPENNYKTTPPVLDSDGSFFLYSK
LTVDKSRWQQGNVFSCSVMHEALHNHYTQKSLSLSPGK
SEQ ID NO: 152 D166-AE144, C-Term-Fc pJH85
MQRVNMIMAESPGLITICLLGYLLSAECTVFLDHENANKILNRPKRYNSGKLEEFVQGNL
ERECMEEKCSFEEAREVFENTERTTEFWKQYVDGDQCESNPCLNGGSCKDDINSYECWCPFGFEG
KNCELDVTCNIKNGRCEQFCKNSADNKVVCSCTEGYRLAENQKSCEPAVPFPCGRVSVSQTSKLT
RAETVFPDVDYVNSTEAETILDGAPSPAGSPTSTEEGTSESATPESGPGSEPATSGSETPGTSES
ATPESGPGTSTEPSEGSAPGTSTEPSEGSAPGTSTEPSEGSAPGTSTEPSEGSAPGTSTEPSEGS
APGTSTEPSEGSAPGSPAGSPTSTEEGTSTEPSEGSAPGASSNITQSTQSFNDFTRVVGGEDAKP
GQFPWQVVLNGKVDAFCGGSIVNEKWIVTAAHCVETGVKITVVAGEHNIEETEHTEQKRNVIRII
PHHNYNAAINKYNHDIALLELDEPLVLNSYVTPICIADKEYTNIFLKFGSGYVSGWGRVFHKGRS
ALVLQYLRVPLVDRATCLLSTKFTIYNNMFCAGFHEGGRDSCQGDSGGPHVTEVEGTSFLIGIIS
WGEECAMKGKYGIYTKVSRYVNWIKEKTKLTDKTHTCPPCPAPELLGGPSVFLEPPKPKDTLMIS
RTPEVTCVVVDVSHEDPEVKFNWYVDGVEVHNAKTKPREEQYNSTYRVVSVLTVLHQDWLNGKEY
KCKVSNKALPAPIEKTISKAKGQPREPQVYTLPPSRDELTKNQVSLTCLVKGFYPSDIAVEWESN

[chemical structure]

[chemical structure]

HEDPEVKFNWYVDGVEVHNAKTKPREEQYNSTYRVVSVLTVLHQDWLNGKEYKCKVSNKALPAPI
EKTISKAKGQPREPQVYTLPPSRDELTKNQVSLTCLVKGFYPSDIAVEWESNGQ
SEQ ID NO: 153 C-Term-Fc pJH56
MQRVNMIMAESPGLITICLLGYLLSAECTVFLDHENANKILNRPKRYNSGKLEEFVQGNLERECM
EEKCSFEEAREVFENTERTTEFWKQYVDGDQCESNPCLNGGSCKDDINSYECWCPFGFEGKNCEL
DVTCNIKNGRCEQFCKNSADNKVVCSCTEGYRLAENQKSCEPAVPFPCGRVSVSQTSKLTRAETV
FPDVDYVNSTEAETILDNITQSTQSFNDFTRVVGGEDAKPGQFPWQVVLNGKVDAFCGGSIVNEK
WIVTAAHCVETGVKITVVAGEHNIEETEHTEQKRNVIRIIPHHNYNAAINKYNHDIALLELDEPL
VLNSYVTPICIADKEYTNIFLKFGSGYVSGWGRVFHKGRSALVLQYLRVPLVDRATCLLSTKFTI
YNNMFCAGFHEGGRDSCQGDSGGPHVTEVEGTSFLTGIISWGEECAMKGKYGIYTKVSRYVNWIK
EKTKLTDKTHTCPPCPAPELLGGPSVFLEPPKPKDTLMISRTPEVTCVVVDVSHEDPEVKFNWYV
DGVEVHNAKTKPREEQYNSTYRVVSVLTVLHQDWLNGKEYKCKVSNKALPAPIEKTISKAKGQPR
EPQVYTLPPSRDELTKNQVSLTCLVKGFYPSDIAVEWESNGQPENNYKTTPPVLDSDGSFFLYSK

[chemical structure]

PCPAPELLGGPSVFLFPPKPKDTLMISRTPEVTCVVVDVSHEDPEVKFNWYVDGVEVHNAKTKPR
EEQYNSTYRVVSVLTVLHQDWLNGKEYKCKVSNKALPAPIEKTISKAKGQPREPQVYTLPPSRDE
LTKNQVSLTCLVKGFYPSDIAVEWESNGQPENNYKTTPPVLDSDGSFFLYSKLTVDKSRWQQGNV
FSCSVMHEALHNHYTQKSLSLSPGK
SEQ ID NO: 226 C-Term-AE288 pSYN-FIX-102

[chemical structure]

EEKCSFEEAREVFENTERTTEFWKQYVDGDQCESNPCLNGGSCKDDINSYECWCPFGFEGKNCEL
DVTCNIKNGRCEQFCKNSADNKVVCSCTEGYRLAENQKSCEPAVPFPCGRVSVSQTSKLTRAETV
FPDVDYVNSTEAETILDNITQSTQSFNDFTRVVGGEDAKPGQFPWQVVLNGKVDAFCGGSIVNEK
WIVTAAHCVETGVKITVVAGEHNIEETEHTEQKRNVIRIIPHHNYNAAINKYNHDIALLELDEPL
VLNSYVTPICIADKEYTNIFLKFGSGYVSGWGRVFHKGRSALVLQYLRVPLVDRATCLLSTKFTI
YNNMFCAGFHEGGRDSCQGDSGGPHVTEVEGTSFLTGIISWGEECAMKGKYGIYTKVSRYVNWIK

[chemical structure]

GSEPATSGSETPGTSESATPESGPGTSTEPSEGSAPGSPAGSPTSTEEGTSESATPESGPGSEPA
TSGSETPGTSESATPESGPGSPAGSPTSTEEGSPAGSPTSTEEGTSTEPSEGSAPGTSESATPES
GPGTSESATPESGPGTSESATPESGPGSEPATSGSETPGSEPATSGSETPGSPAGSPTSTEEGTS

[chemical structure]

[chemical structure]

SEQ ID NO: 227 dual chain D166-AE72, C-Term-Fc pSYN-FIX-216

[chemical structure]

EEKCSFEEAREVFENTERTTEFWKQYVDGDQCESNPCLNGGSCKDDINSYECWCPFGFEGKNCEL
DVTCNIKNGRCEQFCKNSADNKVVCSCTEGYRLAENQKSCEPAVPFPCGRVSVSQTSKLTRAETV
FPDVDYVNSTEAETILDGPSPGSPTSTEEGTSESATPESGPGSEPATSGSETPGTSESATPESGP
GTSTEPSEGSAPGTSTEPSEGSAPGASSNITQSTQSFNDFTRVVGGEDAKPGQFPWQVVLNGKVD
AFCGGSIVNEKWIVTAAHCVETGVKITVVAGEHNIEETEHTEQKRNVIRIIPHHNYNAAINKYNH
DIALLELDEPLVLNSYVTPICIADKEYTNIFLKFGSGYVSGWGRVFHKGRSALVLQYLRVPLVDR
ATCLLSTKFTIYNNMFCAGFHEGGRDSCQGDSGGPHVTEVEGTSFLTGIISWGEECAMKGKYGIY
TKVSRYVNWIKEKTKLTDKTHTCPPCPAPELLGGPSVFLFPPKPKDTLMISRTPEVTCVVVDVSH
EDPEVKFNWYVDGVEVHNAKTKPREEQYNSTYRVVSVLTVLHQDWLNGKEYKCKVSNKALPAPIE
KTISKAKGQPREPQVYTLPPSRDELTKNQVSLTCLVKGFYPSDIAVEWESNGQPENNYKTTPPVL
DSDGSFFLYSKLTVDKSRWQQGNVFSCSVMHEALHNHYTQKSLSLSPG
SEQ ID NO: 228 dual chain D166-AE72, C-Term-Fc pSYN-FIX-216-
Fc chain part
DKTHTCPPCPAPELLGGPSVFLFPPKPKDTLMISRTPEVTCVVVDVSHEDPEVKFNWYVDGVEVH
NAKTKPREEQYNSTYRVVSVLTVLHQDWLNGKEYKCKVSNKALPAPIEKTISKAKGQPREPQVYT
LPPSRDELTKNQVSLTCLVKGFYPSDIAVEWESNGQPENNYKTTPPVLDSDGSFFLYSKLTVDKS
RWQQGNVFSCSVMHEALHNHYTQKSLSLSPG
SEQ ID NO: 229 rFIXFc-R338L, C-Term Fc
YNSGKLEEFVQGNLERECMEEKCSFEEAREVFENTERTTEFWKQYVDGDQCESNPCLNGGSCKDD
INSYECWCPFGFEGKNCELDVTCNIKNGRCEQFCKNSADNKVVCSCTEGYRLAENQKSCEPAVPF
PCGRVSVSQTSKLTRAETVFPDVDYVNSTEAETILDNITQSTQSFNDFTRVVGGEDAKPGQFPWQ
VVLNGKVDAFCGGSIVNEKWIVTAAHCVETGVKITVVAGEHNIEETEHTEQKRNVIRIIPHHNYN
AAINKYNHDIALLELDEPLVLNSYVTPICIADKEYTNIFLKFGSGYVSGWGRVFHKGRSALVLQY
LRVPLVDRATCLLSTKFTIYNNMFCAGFHEGGRDSCQGDSGGPHVTEVEGTSFLTGIISWGEECA
MKGKYGIYTKVSRYVNWIKEKTKLTDKTHTCPPCPAPELLGGPSVFLFPPKPKDTLMISRTPEVT
CVVVDVSHEDPEVKFNWYVDGVEVHNAKTKPREEQYNSTYRVVSVLTVLHQDWLNGKEYKCKVSN
KALPAPIEKTISKAKGQPREPQVYTLPPSRDELTKNQVSLTCLVKGFYPSDIAVEWESNGQPENN
YKTTPPVLDSDGSFFLYSKLTVDKSRWQQGNVFSCSVMHEALHNHYTQKSLSLSPGK

1. A method of administering a Factor IX (FIX) fusion protein to a subject in need thereof, comprising subcutaneously administering to the subject a FIX fusion protein, wherein
(a) the FIX fusion protein comprises a FIX polypeptide and at least a first XTEN, which is inserted within the FIX polypeptide at an insertion site corresponding to an amino acid selected from the group consisting of amino acid 103 of SEQ ID NO: 2, amino acid 105 of SEQ ID NO: 2, amino acid 142 of SEQ ID NO: 2, amino acid 149 of SEQ ID NO: 2, amino acid 162 of SEQ ID NO: 2, amino acid 166 of SEQ ID NO: 2, amino acid 174 of SEQ ID NO: 2, amino acid 224 of SEQ ID NO: 2, amino acid 226 of SEQ ID NO: 2, amino acid 228 of SEQ ID NO: 2, amino acid 413 of SEQ ID NO: 2, and any combination thereof, and
(b) wherein following the administration, the FIX fusion protein exhibits a plasma activity of from about 5% to about 30% in the subject.

2. A method of administering a Factor IX (FIX) fusion protein to a subject in need thereof, comprising subcutaneously administering to the subject a FIX fusion protein comprising a FIX polypeptide and a first Fc domain, wherein the FIX fusion protein comprises an amino acid sequence having at least about 80% sequence identity to SEQ ID NO: 229, and wherein following the administration, the FIX fusion protein exhibits a plasma activity of from about 5% to about 30% in the subject.

3. The method of claim 1, wherein the FIX fusion protein is administered at a dose of about 50 IU/kg to about 400 IU/kg.

4. The method of claim 1, wherein the FIX fusion protein exhibits a plasma activity peak value of about 10% to about 30%.

5. The method of claim 1, wherein the FIX fusion protein exhibits a plasma activity trough value of about 5% to about 10%.

6. The method of claim 1, wherein the insertion site corresponds to an amino acid selected from the group consisting of amino acid 149 of SEQ ID NO: 2, amino acid 162 of SEQ ID NO: 2, amino acid 166 of SEQ ID NO: 2, amino acid 174 of SEQ ID NO: 2, and any combination thereof.

7. The method of claim 1, wherein the XTEN comprises at least about 6 amino acids, at least about 12 amino acids, at least about 36 amino acids, at least about 42 amino acids, at least about 72 amino acids, at least about 144 amino acids, or at least about 288 amino acids.

8. The method of claim 1, wherein the XTEN comprises an amino acid sequence at least about 80%, at least about 85%, at least about 90%, at least about 95%, at least about 96%, at least about 97%, at least about 98%, at least about 99%, or about 100% identical to an amino acid sequence selected from the group consisting of SEQ ID NOs: 34, 35, 36, 37, 38, 39, 40, 41, 42, 43, 44, 45, 46, 47, 48, 49, 50, 51, 52, 53, 202, 203, 204, 205, 206, 207, 208, 209, 210, 211, 212, 213, 214, 230, and any combination thereof.

9. The method of claim 1, wherein the XTEN comprises AE72.

10. The method of claim 1, wherein the FIX fusion protein further comprises a second XTEN, wherein the first XTEN is inserted within the FIX polypeptide at an insertion site corresponding to amino acid 166 of SEQ ID NO: 2, and wherein the second XTEN is fused to the C-terminus of the FIX polypeptide.

11. The method of claim 10, wherein the FIX fusion protein further comprises a first Fc domain.

12. The method of claim 11, wherein the FIX fusion protein further comprises a second Fc domain.

13. The method of claim 12, wherein the FIX fusion protein further comprises two polypeptide chains, wherein the first polypeptide chain comprises the FIX polypeptide fused to the first Fc domain, and the second polypeptide chain comprises the second Fc domain, wherein the first Fc domain and the second Fc domain are associated by a covalent bond.

14. The method of claim 1, wherein the FIX polypeptide is a R338L FIX variant.

15. The method of claim 1, wherein the FIX fusion protein comprises a first chain and a second chain, wherein:
(a) the first chain comprises:
(i) a FIX polypeptide having a 338L mutation;
(ii) an XTEN, wherein the XTEN is inserted within the FIX polypeptide at an insertion site corresponding to amino acid 166 of SEQ ID NO: 2, and wherein the XTEN comprises an amino acid sequence having at least about 72 amino acids; and
(iii) a first Fc domain, wherein the first Fc domain is fused to the FIX polypeptide; and
(b) the second chain comprises a second Fc domain;
wherein the first Fc domain and the second Fc domain are associated by a covalent bond.

16. The method of claim 2, wherein the FIX fusion protein is administered at a dose of about 50 IU/kg to about 400 IU/kg.

17. The method of claim 2, wherein the FIX fusion protein exhibits a plasma activity peak value of about 10% to about 30%.

18. The method of claim 2, wherein the FIX fusion protein exhibits a plasma activity trough value of about 5% to about 10%.

19. The method of claim 2, wherein the FIX fusion protein further comprises a second Fc domain.

20. The method of claim 2, wherein the FIX polypeptide is a R338L FIX variant.

The application's sequence listing, which the Patent Office published only in electronic form, follows.

SEQUENCE LISTING (237 sequences)

SEQ ID NO: 1 - protein, 415 aa, Artificial Sequence
  Description of Artificial Sequence: Synthetic Human FIX polypeptide
YNSGKLEEFVQGNLERECMEEKCSFEEAREVFENTERTTEFWKQYVDGDQCESNPCLNGGSCKDDINSYECWCPFGFEGKNCELDVTCNIKNGRCEQFCKNSADNKVVCSCTEGYRLAENQKSCEPAVPFPCGRVSVSQTSKLTRAETVFPDVDYVNSTEAETILDNITQSTQSFNDFTRVVGGEDAKPGQFPWQVVLNGKVDAFCGGSIVNEKWIVTAAHCVETGVKITVVAGEHNIEETEHTEQKRNVIRIIPHHNYNAAINKYNHDIALLELDEPLVLNSYVTPICIADKEYTNIFLKFGSGYVSGWGRVFHKGRSALVLQYLRVPLVDRATCLRSTKFTIYNNMFCAGFHEGGRDSCQGDSGGPHVTEVEGTSFLTGIISWGEECAMKGKYGIYTKVSRYVNWIKEKTKLT

SEQ ID NO: 2 - protein, 415 aa, Artificial Sequence
  Description of Artificial Sequence: Synthetic Padua FIX Polypeptide
YNSGKLEEFVQGNLERECMEEKCSFEEAREVFENTERTTEFWKQYVDGDQCESNPCLNGGSCKDDINSYECWCPFGFEGKNCELDVTCNIKNGRCEQFCKNSADNKVVCSCTEGYRLAENQKSCEPAVPFPCGRVSVSQTSKLTRAETVFPDVDYVNSTEAETILDNITQSTQSFNDFTRVVGGEDAKPGQFPWQVVLNGKVDAFCGGSIVNEKWIVTAAHCVETGVKITVVAGEHNIEETEHTEQKRNVIRIIPHHNYNAAINKYNHDIALLELDEPLVLNSYVTPICIADKEYTNIFLKFGSGYVSGWGRVFHKGRSALVLQYLRVPLVDRATCLLSTKFTIYNNMFCAGFHEGGRDSCQGDSGGPHVTEVEGTSFLTGIISWGEECAMKGKYGIYTKVSRYVNWIKEKTKLT

SEQ ID NO: 3 - protein, 46 aa, Artificial Sequence
  Description of Artificial Sequence: Synthetic Human FIX Signal Polypeptide and Propeptide
MQRVNMIMAESPGLITICLLGYLLSAECTVFLDHENANKILNRPKR

SEQ ID NO: 4 - protein, 12 aa, Artificial Sequence
  Description of Artificial Sequence: Synthetic AD
GESPGGSSGSES

SEQ ID NO: 5 - protein, 12 aa, Artificial Sequence
  Description of Artificial Sequence: Synthetic AD
GSEGSSGPGESS

SEQ ID NO: 6 - protein, 12 aa, Artificial Sequence
  Description of Artificial Sequence: Synthetic AD
GSSESGSSEGGP

SEQ ID NO: 7 - protein, 12 aa, Artificial Sequence
  Description of Artificial Sequence: Synthetic AD
GSGGEPSESGSS

SEQ ID NO: 8 - protein, 12 aa, Artificial Sequence
  Description of Artificial Sequence: Synthetic AE, AM
GSPAGSPTSTEE

SEQ ID NO: 9 - protein, 12 aa, Artificial Sequence
  Description of Artificial Sequence: Synthetic AE, AM, AQ
GSEPATSGSETP

SEQ ID NO: 10 - protein, 12 aa, Artificial Sequence
  Description of Artificial Sequence: Synthetic AE, AM, AQ
GTSESATPESGP

SEQ ID NO: 11 - protein, 12 aa, Artificial Sequence
  Description of Artificial Sequence: Synthetic AE, AM, AQ
GTSTEPSEGSAP

SEQ ID NO: 12 - protein, 12 aa, Artificial Sequence
  Description of Artificial Sequence: Synthetic AF, AM
GSTSESPSGTAP

SEQ ID NO: 13 - protein, 12 aa, Artificial Sequence
  Description of Artificial Sequence: Synthetic AF, AM
GTSTPESGSASP

SEQ ID NO: 14 - protein, 12 aa, Artificial Sequence
  Description of Artificial Sequence: Synthetic AF, AM
GTSPSGESSTAP

SEQ ID NO: 15 - protein, 12 aa, Artificial Sequence
  Description of Artificial Sequence: Synthetic AF, AM
GSTSSTAESPGP

SEQ ID NO: 16 - protein, 12 aa, Artificial Sequence
  Description of Artificial Sequence: Synthetic AG, AM
GTPGSGTASSSP

SEQ ID NO: 17 - protein, 12 aa, Artificial Sequence
  Description of Artificial Sequence: Synthetic AG, AM
GSSTPSGATGSP

SEQ ID NO: 18 - protein, 12 aa, Artificial Sequence
  Description of Artificial Sequence: Synthetic AG, AM
GSSPSASTGTGP

SEQ ID NO: 19 - protein, 12 aa, Artificial Sequence
  Description of Artificial Sequence: Synthetic AG, AM
GASPGTSSTGSP

SEQ ID NO: 20 - protein, 12 aa, Artificial Sequence
  Description of Artificial Sequence: Synthetic AQ
GEPAGSPTSTSE

SEQ ID NO: 21 - protein, 12 aa, Artificial Sequence
  Description of Artificial Sequence: Synthetic AQ
GTGEPSSTPASE

SEQ ID NO: 22 - protein, 12 aa, Artificial Sequence
  Description of Artificial Sequence: Synthetic AQ
GSGPSTESAPTE

SEQ ID NO: 23 - protein, 12 aa, Artificial Sequence
  Description of Artificial Sequence: Synthetic AQ
GSETPSGPSETA

SEQ ID NO: 24 - protein, 12 aa, Artificial Sequence
  Description of Artificial Sequence: Synthetic AQ
GPSETSTSEPGA

SEQ ID NO: 25 - protein, 12 aa, Artificial Sequence
  Description of Artificial Sequence: Synthetic AQ
GSPSEPTEGTSA

SEQ ID NO: 26 - protein, 12 aa, Artificial Sequence
  Description of Artificial Sequence: Synthetic BC
GSGASEPTSTEP

SEQ ID NO: 27 - protein, 12 aa, Artificial Sequence
  Description of Artificial Sequence: Synthetic BC
GSEPATSGTEPS

SEQ ID NO: 28 - protein, 12 aa, Artificial Sequence
  Description of Artificial Sequence: Synthetic BC
GTSEPSTSEPGA

SEQ ID NO: 29 - protein, 12 aa, Artificial Sequence
  Description of Artificial Sequence: Synthetic BC
GTSTEPSEPGSA

SEQ ID NO: 30 - protein, 12 aa, Artificial Sequence
  Description of Artificial Sequence: Synthetic BD
GSTAGSETSTEA

SEQ ID NO: 31 - protein, 12 aa, Artificial Sequence
  Description of Artificial Sequence: Synthetic BD
GSETATSGSETA

SEQ ID NO: 32 - protein, 12 aa, Artificial Sequence
  Description of Artificial Sequence: Synthetic BD
GTSESATSESGA

SEQ ID NO: 33 - protein, 12 aa, Artificial Sequence
  Description of Artificial Sequence: Synthetic BD
GTSTEASEGSAS

SEQ ID NO: 34 - protein, 42 aa, Artificial Sequence
  Description of Artificial Sequence: Synthetic AE42
GAPGSPAGSPTSTEEGTSESATPESGPGSEPATSGSETPASS

SEQ ID NO: 35 - protein, 78 aa, Artificial Sequence
  Description of Artificial Sequence: Synthetic AE72
GAPTSESATPESGPGSEPATSGSETPGTSESATPESGPGSEPATSGSETPGTSESATPESGPGTSTEPSEGSAPGASS

SEQ ID NO: 36 - protein, 143 aa, Artificial Sequence
  Description of Artificial Sequence: Synthetic AE144
GSEPATSGSETPGTSESATPESGPGSEPATSGSETPGSPAGSPTSTEEGTSTEPSEGSAPGSEPATSGSETPGSEPATSGSETPGSEPATSGSETPGTSTEPSEGSAPGTSESAPESGPGSEPATSGSETPGTSTEPSEGSAP

SEQ ID NO: 37 - protein, 144 aa, Artificial Sequence
  Description of Artificial Sequence: Synthetic AE144_2A
TSTEPSEGSAPGSPAGSPTSTEEGTSTEPSEGSAPGTSTEPSEGSAPGTSESATPESGPGTSTEPSEGSAPGTSESATPESGPGSEPATSGSETPGTSTEPSEGSAPGTSTEPSEGSAPGTSESATPESGPGTSESATPESGPG

SEQ ID NO: 38 - protein, 144 aa, Artificial Sequence
  Description of Artificial Sequence: Synthetic AE144_3B
SPAGSPTSTEEGTSESATPESGPGSEPATSGSETPGTSESATPESGPGTSTEPSEGSAPGTSTEPSEGSAPGTSTEPSEGSAPGTSTEPSEGSAPGTSTEPSEGSAPGTSTEPSEGSAPGSPAGSPTSTEEGTSTEPSEGSAPG

SEQ ID NO: 39 - protein, 144 aa, Artificial Sequence
  Description of Artificial Sequence: Synthetic AE144_4A
TSESATPESGPGSEPATSGSETPGTSESATPESGPGSEPATSGSETPGTSESATPESGPGTSTEPSEGSAPGTSESATPESGPGSPAGSPTSTEEGSPAGSPTSTEEGSPAGSPTSTEEGTSESATPESGPGTSTEPSEGSAPG

SEQ ID NO: 40 - protein, 144 aa, Artificial Sequence
  Description of Artificial Sequence: Synthetic AE144_5A
TSESATPESGPGSEPATSGSETPGTSESATPESGPGSEPATSGSETPGTSESATPESGPGTSTEPSEGSAPGSPAGSPTSTEEGTSESATPESGPGSEPATSGSETPGTSESATPESGPGSPAGSPTSTEEGSPAGSPTSTEEG

SEQ ID NO: 41 - protein, 144 aa, Artificial Sequence
  Description of Artificial Sequence: Synthetic AE144_6B
TSTEPSEGSAPGTSESATPESGPGTSESATPESGPGTSESATPESGPGSEPATSGSETPGSEPATSGSETPGSPAGSPTSTEEGTSTEPSEGSAPGTSTEPSEGSAPGSEPATSGSETPGTSESATPESGPGTSTEPSEGSAPG

SEQ ID NO: 42 - protein, 144 aa, Artificial Sequence
  Description of Artificial Sequence: Synthetic AG144
GTPGSGTASSSPGSSTPSGATGSPGSSPSASTGTGPGSSPSASTGTGPGASPGTSSTGSPGASPGTSSTGSPGSSTPSGATGSPGSSPSASTGTGPGASPGTSSTGSPGSSPSASTGTGPGTPGSGTASSSPGSSTPSGATGSP

SEQ ID NO: 43 - protein, 144 aa, Artificial Sequence
  Description of Artificial Sequence: Synthetic AG144_A
GASPGTSSTGSPGSSPSASTGTGPGSSPSASTGTGPGTPGSGTASSSPGSSTPSGATGSPGSSPSASTGTGPGASPGTSSTGSPGTPGSGTASSSPGSSTPSGATGSPGTPGSGTASSSPGASPGTSSTGSPGASPGTSSTGSP

SEQ ID NO: 44 - protein, 144 aa, Artificial Sequence
  Description of Artificial Sequence: Synthetic AG144_B
GTPGSGTASSSPGSSTPSGATGSPGASPGTSSTGSPGTPGSGTASSSPGSSTPSGATGSPGSSPSASTGTGPGSSPSASTGTGPGSSTPSGATGSPGSSTPSGATGSPGASPGTSSTGSPGASPGTSSTGSPGASPGTSSTGSP

SEQ ID NO: 45 - protein, 144 aa, Artificial Sequence
  Description of Artificial Sequence: Synthetic AG144_C
GTPGSGTASSSPGASPGTSSTGSPGASPGTSSTGSPGASPGTSSTGSPGSSPSASTGTGPGTPGSGTASSSPGASPGTSSTGSPGASPGTSSTGSPGASPGTSSTGSPGSSTPSGATGSPGSSTPSGATGSPGASPGTSSTGSP

SEQ ID NO: 46 - protein, 144 aa, Artificial Sequence
  Description of Artificial Sequence: Synthetic AG144_F
GSSPSASTGTGPGSSPSASTGTGPGASPGTSSTGSPGASPGTSSTGSPGSSTPSGATGSPGSSPSASTGTGPGASPGTSSTGSPGSSPSASTGTGPGTPGSGTASSSPGSSTPSGATGSPGSSTPSGATGSPGASPGTSSTGSP

SEQ ID NO: 47 - protein, 288 aa, Artificial Sequence
  Description of Artificial Sequence: Synthetic AE288
GTSESATPESGPGSEPATSGSETPGTSESATPESGPGSEPATSGSETPGTSESATPESGPGTSTEPSEGSAPGSPAGSPTSTEEGTSESATPESGPGSEPATSGSETPGTSESATPESGPGSPAGSPTSTEEGSPAGSPTSTEEGTSTEPSEGSAPGTSESATPESGPGTSESATPESGPGTSESATPESGPGSEPATSGSETPGSEPATSGSETPGSPAGSPTSTEEGTSTEPSEGSAPGTSTEPSEGSAPGSEPATSGSETPGTSESATPESGPGTSTEPSEGSAP

SEQ ID NO: 48 - protein, 288 aa, Artificial Sequence
  Description of Artificial Sequence: Synthetic AE288_2
GSPAGSPTSTEEGTSESATPESGPGSEPATSGSETPGTSESATPESGPGTSTEPSEGSAPGTSTEPSEGSAPGTSTEPSEGSAPGTSTEPSEGSAPGTSTEPSEGSAPGTSTEPSEGSAPGSPAGSPTSTEEGTSTEPSEGSAPGTSESATPESGPGSEPATSGSETPGTSESATPESGPGSEPATSGSETPGTSESATPESGPGTSTEPSEGSAPGTSESATPESGPGSPAGSPTSTEEGSPAGSPTSTEEGSPAGSPTSTEEGTSESATPESGPGTSTEPSEGSAP

SEQ ID NO: 49 - protein, 288 aa, Artificial Sequence
  Description of Artificial Sequence: Synthetic AG288
PGASPGTSSTGSPGASPGTSSTGSPGTPGSGTASSSPGSSTPSGATGSPGTPGSGTASSSPGSSTPSGATGSPGTPGSGTASSSPGSSTPSGATGSPGSSTPSGATGSPGSSPSASTGTGPGSSPSASTGTGPGASPGTSSTGSPGTPGSGTASSSPGSSTPSGATGSPGSSPSASTGTGPGSSPSASTGTGPGASPGTSSTGSPGASPGTSSTGSPGSSTPSGATGSPGSSPSASTGTGPGASPGTSSTGSPGSSPSASTGTGPGTPGSGTASSSPGSSTPSGATGS

SEQ ID NO: 50 - protein, 576 aa, Artificial Sequence
  Description of Artificial Sequence: Synthetic AE576
GSPAGSPTSTEEGTSESATPESGPGTSTEPSEGSAPGSPAGSPTSTEEGTSTEPSEGSAPGTSTEPSEGSAPGTSESATPESGPGSEPATSGSETPGSEPATSGSETPGSPAGSPTSTEEGTSESATPESGPGTSTEPSEGSAPGTSTEPSEGSAPGSPAGSPTSTEEGTSTEPSEGSAPGTSTEPSEGSAPGTSESATPESGPGTSTEPSEGSAPGTSESATPESGPGSEPATSGSETPGTSTEPSEGSAPGTSTEPSEGSAPGTSESATPESGPGTSESATPESGPGSPAGSPTSTEEGTSESATPESGPGSEPATSGSETPGTSESATPESGPGTSTEPSEGSAPGTSTEPSEGSAPGTSTEPSEGSAPGTSTEPSEGSAPGTSTEPSEGSAPGTSTEPSEGSAPGSPAGSPTSTEEGTSTEPSEGSAPGTSESATPESGPGSEPATSGSETPGTSESATPESGPGSEPATSGSETPGTSESATPESGPGTSTEPSEGSAPGTSESATPESGPGSPAGSPTSTEEGSPAGSPTSTEEGSPAGSPTSTEEGTSESATPESGPGTSTEPSEGSAP

SEQ ID NO: 51 - protein, 576 aa, Artificial Sequence
  Description of Artificial Sequence: Synthetic AG576
PGTPGSGTASSSPGSSTPSGATGSPGSSPSASTGTGPGSSPSASTGTGPGSSTPSGATGSPGSSTPSGATGSPGASPGTSSTGSPGASPGTSSTGSPGASPGTSSTGSPGTPGSGTASSSPGASPGTSSTGSPGASPGTSSTGSPGASPGTSSTGSPGSSPSASTGTGPGTPGSGTASSSPGASPGTSSTGSPGASPGTSSTGSPGASPGTSSTGSPGSSTPSGATGSPGSSTPSGATGSPGASPGTSSTGSPGTPGSGTASSSPGSSTPSGATGSPGSSTPSGATGSPGSSTPSGATGSPGSSPSASTGTGPGASPGTSSTGSPGASPGTSSTGSPGTPGSGTASSSPGASPGTSSTGSPGASPGTSSTGSPGASPGTSSTGSPGASPGTSSTGSPGTPGSGTASSSPGSSTPSGATGSPGTPGSGTASSSPGSSTPSGATGSPGTPGSGTASSSPGSSTPSGATGSPGSSTPSGATGSPGSSPSASTGTGPGSSPSASTGTGPGASPGTSSTGSPGTPGSGTASSSPGSSTPSGATGSPGSSPSASTGTGPGSSPSASTGTGPGASPGTSSTGS

SEQ ID NO: 52 - protein, 864 aa, Artificial Sequence
  Description of Artificial Sequence: Synthetic AE864
GSPAGSPTSTEEGTSESATPESGPGTSTEPSEGSAPGSPAGSPTSTEEGTSTEPSEGSAPGTSTEPSEGSAPGTSESATPESGPGSEPATSGSETPGSEPATSGSETPGSPAGSPTSTEEGTSESATPESGPGTSTEPSEGSAPGTSTEPSEGSAPGSPAGSPTSTEEGTSTEPSEGSAPGTSTEPSEGSAPGTSESATPESGPGTSTEPSEGSAPGTSESATPESGPGSEPATSGSETPGTSTEPSEGSAPGTSTEPSEGSAPGTSESATPESGPGTSESATPESGPGSPAGSPTSTEEGTSESATPESGPGSEPATSGSETPGTSESATPESGPGTSTEPSEGSAPGTSTEPSEGSAPGTSTEPSEGSAPGTSTEPSEGSAPGTSTEPSEGSAPGTSTEPSEGSAPGSPAGSPTSTEEGTSTEPSEGSAPGTSESATPESGPGSEPATSGSETPGTSESATPESGPGSEPATSGSETPGTSESATPESGPGTSTEPSEGSAPGTSESATPESGPGSPAGSPTSTEEGSPAGSPTSTEEGSPAGSPTSTEEGTSESATPESGPGTSTEPSEGSAPGTSESATPESGPGSEPATSGSETPGTSESATPESGPGSEPATSGSETPGTSESATPESGPGTSTEPSEGSAPGSPAGSPTSTEEGTSESATPESGPGSEPATSGSETPGTSESATPESGPGSPAGSPTSTEEGSPAGSPTSTEEGTSTEPSEGSAPGTSESATPESGPGTSESATPESGPGTSESATPESGPGSEPATSGSETPGSEPATSGSETPGSPAGSPTSTEEGTSTEPSEGSAPGTSTEPSEGSAPGSEPATSGSETPGTSESATPESGPGTSTEPSEGSAP

SEQ ID NO: 53 - protein, 864 aa, Artificial Sequence
  Description of Artificial Sequence: Synthetic AG864
GASPGTSSTGSPGSSPSASTGTGPGSSPSASTGTGPGTPGSGTASSSPGSSTPSGATGSPGSSPSASTGTGPGASPGTSSTGSPGTPGSGTASSSPGSSTPSGATGSPGTPGSGTASSSPGASPGTSSTGSPGASPGTSSTGSPGTPGSGTASSSPGSSTPSGATGSPGASPGTSSTGSPGTPGSGTASSSPGSSTPSGATGSPGSSPSASTGTGPGSSPSASTGTGPGSSTPSGATGSPGSSTPSGATGSPGASPGTSSTGSPGASPGTSSTGSPGASPGTSSTGSPGTPGSGTASSSPGASPGTSSTGSPGASPGTSSTGSPGASPGTSSTGSPGSSPSASTGTGPGTPGSGTASSSPGASPGTSSTGSPGASPGTSSTGSPGASPGTSSTGSPGSSTPSGATGSPGSSTPSGATGSPGASPGTSSTGSPGTPGSGTASSSPGSSTPSGATGSPGSSTPSGATGSPGSSTPSGATGSPGSSPSASTGTGPGASPGTSSTGSPGASPGTSSTGSPGTPGSGTASSSPGASPGTSSTGSPGASPGTSSTGSPGASPGTSSTGSPGASPGTSSTGSPGTPGSGTASSSPGSSTPSGATGSPGTPGSGTASSSPGSSTPSGATGSPGTPGSGTASSSPGSSTPSGATGSPGSSTPSGATGSPGSSPSASTGTGPGSSPSASTGTGPGASPGTSSTGSPGTPGSGTASSSPGSSTPSGATGSPGSSPSASTGTGPGSSPSASTGTGPGASPGTSSTGSPGASPGTSSTGSPGSSTPSGATGSPGSSPSASTGTGPGASPGTSSTGSPGSSPSASTGTGPGTPGSGTASSSPGSSTPSGATGSPGSSTPSGATGSPGASPGTSSTGSP

SEQ ID NO: 54 - protein, 549 aa, Artificial Sequence
  Description of Artificial Sequence: Synthetic pNL118
MQRVNMIMAESPGLITICLLGYLLSAECTVFLDHENANKILNRPKRYNSGKLEEFVQGNLERECMEEKCSFEEAREVFENTERTTEFWKQYVDGDQCESNPCLNGGSCKDDINSYECWCPFGFEGKNCELDVTCNIKNGRCEQFCKNSADNKVVCSCTEGAPGSPAGSPTSTEEGTSESATPESGPGSEPATSGSETPASSGYRLAENQKSCEPAVPFPCGRVSVSQTSKLTRAETVFPDVDYVNSTEAETILDNITQSTQSFNDFTRVVGGEDAKPGQFPWQVVLNGKVDAFCGGSIVNEKWIVTAAHCVETGVKITVVAGEHNIEETEHTEQKRNVIRIIPHHNYNAAINKYNHDIALLELDEPLVLNSYVTPICIADKEYTNIFLKFGSGYVSGWGRVFHKGRSALVLQYLRVPLVDRATCLLSTKFTIYNNMFCAGFHEGGRDSCQGDSGGPHVTEVEGTSFLTGIISWGEECAMKGKYGIYTKVSRYVNWIKEKTKLTGPEGPSKLTRAETGAGSPGAETAEQKLISEEDLSPATGHHHHHHHH

SEQ ID NO: 55 - protein, 549 aa, Artificial Sequence
  Description of Artificial Sequence: Synthetic pNL116
MQRVNMIMAESPGLITICLLGYLLSAECTVFLDHENANKILNRPKRYNSGKLEEFVQGNLERECMEEKCSFEEAREVFENTERTTEFWKQYVDGDQCESNPCLNGGSCKDDINSYECWCPFGFEGKNCELDVTCNGAPGSPAGSPTSTEEGTSESATPESGPGSEPATSGSETPASSIKNGRCEQFCKNSADNKVVCSCTEGYRLAENQKSCEPAVPFPCGRVSVSQTSKLTRAETVFPDVDYVNSTEAETILDNITQSTQSFNDFTRVVGGEDAKPGQFPWQVVLNGKVDAFCGGSIVNEKWIVTAAHCVETGVKITVVAGEHNIEETEHTEQKRNVIRIIPHHNYNAAINKYNHDIALLELDEPLVLNSYVTPICIADKEYTNIFLKFGSGYVSGWGRVFHKGRSALVLQYLRVPLVDRATCLLSTKFTIYNNMFCAGFHEGGRDSCQGDSGGPHVTEVEGTSFLTGIISWGEECAMKGKYGIYTKVSRYVNWIKEKTKLTGPEGPSKLTRAETGAGSPGAETAEQKLISEEDLSPATGHHHHHHHH

SEQ ID NO: 56 - protein, 549 aa, Artificial Sequence
  Description of Artificial Sequence: Synthetic pNL117
MQRVNMIMAESPGLITICLLGYLLSAECTVFLDHENANKILNRPKRYNSGKLEEFVQGNLERECMEEKCSFEEAREVFENTERTTEFWKQYVDGDQCESNPCLNGGSCKDDINSYECWCPFGFEGKNCELDVTCNIKNGRCEQFCKNSAGAPGSPAGSPTSTEEGTSESATPESGPGSEPATSGSETPASSDNKVVCSCTEGYRLAENQKSCEPAVPFPCGRVSVSQTSKLTRAETVFPDVDYVNSTEAETILDNITQSTQSFNDFTRVVGGEDAKPGQFPWQVVLNGKVDAFCGGSIVNEKWIVTAAHCVETGVKITVVAGEHNIEETEHTEQKRNVIRIIPHHNYNAAINKYNHDIALLELDEPLVLNSYVTPICIADKEYTNIFLKFGSGYVSGWGRVFHKGRSALVLQYLRVPLVDRATCLLSTKFTIYNNMFCAGFHEGGRDSCQGDSGGPHVTEVEGTSFLTGIISWGEECAMKGKYGIYTKVSRYVNWIKEKTKLTGPEGPSKLTRAETGAGSPGAETAEQKLISEEDLSPATGHHHHHHHH

SEQ ID NO: 57 - protein, 549 aa, Artificial Sequence
  Description of Artificial Sequence: Synthetic pNL119
MQRVNMIMAESPGLITICLLGYLLSAECTVFLDHENANKILNRPKRYNSGKLEEFVQGNLERECMEEKCSFEEAREVFENTERTTEFWKQYVDGDQCESNPCLNGGSCKDDINSYECWCPFGFEGKNCELDVTCNIKNGRCEQFCKNSADNKVVCSCTEGYRLAENQKSCEPAVPGAPGSPAGSPTSTEEGTSESATPESGPGSEPATSGSETPASSFPCGRVSVSQTSKLTRAETVFPDVDYVNSTEAETILDNITQSTQSFNDFTRVVGGEDAKPGQFPWQVVLNGKVDAFCGGSIVNEKWIVTAAHCVETGVKITVVAGEHNIEETEHTEQKRNVIRIIPHHNYNAAINKYNHDIALLELDEPLVLNSYVTPICIADKEYTNIFLKFGSGYVSGWGRVFHKGRSALVLQYLRVPLVDRATCLLSTKFTIYNNMFCAGFHEGGRDSCQGDSGGPHVTEVEGTSFLTGIISWGEECAMKGKYGIYTKVSRYVNWIKEKTKLTGPEGPSKLTRAETGAGSPGAETAEQKLISEEDLSPATGHHHHHHHH

SEQ ID NO: 58 - protein, 549 aa, Artificial Sequence
  Description of Artificial Sequence: Synthetic pNL120
MQRVNMIMAESPGLITICLLGYLLSAECTVFLDHENANKILNRPKRYNSGKLEEFVQGNLERECMEEKCSFEEAREVFENTERTTEFWKQYVDGDQCESNPCLNGGSCKDDINSYECWCPFGFEGKNCELDVTCNIKNGRCEQFCKNSADNKVVCSCTEGYRLAENQKSCEPAVPFPCGRVSVSQTSKGAPGSPAGSPTSTEEGTSESATPESGPGSEPATSGSETPASSLTRAETVFPDVDYVNSTEAETILDNITQSTQSFNDFTRVVGGEDAKPGQFPWQVVLNGKVDAFCGGSIVNEKWIVTAAHCVETGVKITVVAGEHNIEETEHTEQKRNVIRIIPHHNYNAAINKYNHDIALLELDEPLVLNSYVTPICIADKEYTNIFLKFGSGYVSGWGRVFHKGRSALVLQYLRVPLVDRATCLLSTKFTIYNNMFCAGFHEGGRDSCQGDSGGPHVTEVEGTSFLTGIISWGEECAMKGKYGIYTKVSRYVNWIKEKTKLTGPEGPSKLTRAETGAGSPGAETAEQKLISEEDLSPATGHHHHHHHH

SEQ ID NO: 59 - protein, 549 aa, Artificial Sequence
  Description of Artificial Sequence: Synthetic pNL121
MQRVNMIMAESPGLITICLLGYLLSAECTVFLDHENANKILNRPKRYNSGKLEEFVQGNLERECMEEKCSFEEAREVFENTERTTEFWKQYVDGDQCESNPCLNGGSCKDDINSYECWCPFGFEGKNCELDVTCNIKNGRCEQFCKNSADNKVVCSCTEGYRLAENQKSCEPAVPFPCGRVSVSQTSKLTRAETVGAPGSPAGSPTSTEEGTSESATPESGPGSEPATSGSETPASSFPDVDYVNSTEAETILDNITQSTQSFNDFTRVVGGEDAKPGQFPWQVVLNGKVDAFCGGSIVNEKWIVTAAHCVETGVKITVVAGEHNIEETEHTEQKRNVIRIIPHHNYNAAINKYNHDIALLELDEPLVLNSYVTPICIADKEYTNIFLKFGSGYVSGWGRVFHKGRSALVLQYLRVPLVDRATCLLSTKFTIYNNMFCAGFHEGGRDSCQGDSGGPHVTEVEGTSFLTGIISWGEECAMKGKYGIYTKVSRYVNWIKEKTKLTGPEGPSKLTRAETGAGSPGAETAEQKLISEEDLSPATGHHHHHHHH

SEQ ID NO: 60 - protein, 549 aa, Artificial Sequence
  Description of Artificial Sequence: Synthetic pNL122
MQRVNMIMAESPGLITICLLGYLLSAECTVFLDHENANKILNRPKRYNSGKLEEFVQGNLERECMEEKCSFEEAREVFENTERTTEFWKQYVDGDQCESNPCLNGGSCKDDINSYECWCPFGFEGKNCELDVTCNIKNGRCEQFCKNSADNKVVCSCTEGYRLAENQKSCEPAVPFPCGRVSVSQTSKLTRAETVFPDVDYVNSTEAEGAPGSPAGSPTSTEEGTSESATPESGPGSEPATSGSETPASSTILDNITQSTQSFNDFTRVVGGEDAKPGQFPWQVVLNGKVDAFCGGSIVNEKWIVTAAHCVETGVKITVVAGEHNIEETEHTEQKRNVIRIIPHHNYNAAINKYNHDIALLELDEPLVLNSYVTPICIADKEYTNIFLKFGSGYVSGWGRVFHKGRSALVLQYLRVPLVDRATCLLSTKFTIYNNMFCAGFHEGGRDSCQGDSGGPHVTEVEGTSFLTGIISWGEECAMKGKYGIYTKVSRYVNWIKEKTKLTGPEGPSKLTRAETGAGSPGAETAEQKLISEEDLSPATGHHHHHHHH

SEQ ID NO: 61 - protein, 549 aa, Artificial Sequence
  Description of Artificial Sequence: Synthetic pNL123
MQRVNMIMAESPGLITICLLGYLLSAECTVFLDHENANKILNRPKRYNSGKLEEFVQGNLERECMEEKCSFEEAREVFENTERTTEFWKQYVDGDQCESNPCLNGGSCKDDINSYECWCPFGFEGKNCELDVTCNIKNGRCEQFCKNSADNKVVCSCTEGYRLAENQKSCEPAVPFPCGRVSVSQTSKLTRAETVFPDVDYVNSTEAETILDGAPGSPAGSPTSTEEGTSESATPESGPGSEPATSGSETPASSNITQSTQSFNDFTRVVGGEDAKPGQFPWQVVLNGKVDAFCGGSIVNEKWIVTAAHCVETGVKITVVAGEHNIEETEHTEQKRNVIRIIPHHNYNAAINKYNHDIALLELDEPLVLNSYVTPICIADKEYTNIFLKFGSGYVSGWGRVFHKGRSALVLQYLRVPLVDRATCLLSTKFTIYNNMFCAGFHEGGRDSCQGDSGGPHVTEVEGTSFLTGIISWGEECAMKGKYGIYTKVSRYVNWIKEKTKLTGPEGPSKLTRAETGAGSPGAETAEQKLISEEDLSPATGHHHHHHHH

SEQ ID NO: 62 - protein, 549 aa, Artificial Sequence
  Description of Artificial Sequence: Synthetic pNL124
MQRVNMIMAESPGLITICLLGYLLSAECTVFLDHENANKILNRPKRYNSGKLEEFVQGNLERECMEEKCSFEEAREVFENTERTTEFWKQYVDGDQCESNPCLNGGSCKDDINSYECWCPFGFEGKNCELDVTCNIKNGRCEQFCKNSADNKVVCSCTEGYRLAENQKSCEPAVPFPCGRVSVSQTSKLTRAETVFPDVDYVNSTEAETILDNITQSTQSGAPGSPAGSPTSTEEGTSESATPESGPGSEPATSGSETPASSFNDFTRVVGGEDAKPGQFPWQVVLNGKVDAFCGGSIVNEKWIVTAAHCVETGVKITVVAGEHNIEETEHTEQKRNVIRIIPHHNYNAAINKYNHDIALLELDEPLVLNSYVTPICIADKEYTNIFLKFGSGYVSGWGRVFHKGRSALVLQYLRVPLVDRATCLLSTKFTIYNNMFCAGFHEGGRDSCQGDSGGPHVTEVEGTSFLTGIISWGEECAMKGKYGIYTKVSRYVNWIKEKTKLTGPEGPSKLTRAETGAGSPGAETAEQKLISEEDLSPATGHHHHHHHH

SEQ ID NO: 63 - protein, 549 aa, Artificial Sequence
  Description of Artificial Sequence: Synthetic pNL125
MQRVNMIMAESPGLITICLLGYLLSAECTVFLDHENANKILNRPKRYNSGKLEEFVQGNLERECMEEKCSFEEAREVFENTERTTEFWKQYVDGDQCESNPCLNGGSCKDDINSYECWCPFGFEGKNCELDVTCNIKNGRCEQFCKNSADNKVVCSCTEGYRLAENQKSCEPAVPFPCGRVSVSQTSKLTRAETVFPDVDYVNSTEAETILDNITQSTQSFNDFTRVVGGEDAKGAPGSPAGSPTSTEEGTSESATPESGPGSEPATSGSETPASSPGQFPWQVVLNGKVDAFCGGSIVNEKWIVTAAHCVETGVKITVVAGEHNIEETEHTEQKRNVIRIIPHHNYNAAINKYNHDIALLELDEPLVLNSYVTPICIADKEYTNIFLKFGSGYVSGWGRVFHKGRSALVLQYLRVPLVDRATCLLSTKFTIYNNMFCAGFHEGGRDSCQGDSGGPHVTEVEGTSFLTGIISWGEECAMKGKYGIYTKVSRYVNWIKEKTKLTGPEGPSKLTRAETGAGSPGAETAEQKLISEEDLSPATGHHHHHHHH

SEQ ID NO: 64 - protein, 549 aa, Artificial Sequence
  Description of Artificial Sequence: Synthetic pNL126
MQRVNMIMAESPGLITICLLGYLLSAECTVFLDHENANKILNRPKRYNSGKLEEFVQGNLERECMEEKCSFEEAREVFENTERTTEFWKQYVDGDQCESNPCLNGGSCKDDINSYECWCPFGFEGKNCELDVTCNIKNGRCEQFCKNSADNKVVCSCTEGYRLAENQKSCEPAVPFPCGRVSVSQTSKLTRAETVFPDVDYVNSTEAETILDNITQSTQSFNDFTRVVGGEDAKPGQFPWQVVLNGKVGAPGSPAGSPTSTEEGTSESATPESGPGSEPATSGSETPASSDAFCGGSIVNEKWIVTAAHCVETGVKITVVAGEHNIEETEHTEQKRNVIRIIPHHNYNAAINKYNHDIALLELDEPLVLNSYVTPICIADKEYTNIFLKFGSGYVSGWGRVFHKGRSALVLQYLRVPLVDRATCLLSTKFTIYNNMFCAGFHEGGRDSCQGDSGGPHVTEVEGTSFLTGIISWGEECAMKGKYGIYTKVSRYVNWIKEKTKLTGPEGPSKLTRAETGAGSPGAETAEQKLISEEDLSPATGHHHHHHHH

SEQ ID NO: 65 - protein, 549 aa, Artificial Sequence
  Description of Artificial Sequence: Synthetic pNL127
MQRVNMIMAESPGLITICLLGYLLSAECTVFLDHENANKILNRPKRYNSGKLEEFVQGNLERECMEEKCSFEEAREVFENTERTTEFWKQYVDGDQCESNPCLNGGSCKDDINSYECWCPFGFEGKNCELDVTCNIKNGRCEQFCKNSADNKVVCSCTEGYRLAENQKSCEPAVPFPCGRVSVSQTSKLTRAETVFPDVDYVNSTEAETILDNITQSTQSFNDFTRVVGGEDAKPGQFPWQVVLNGKVDAFCGGSIVNEKWIVTAAHCVEGAPGSPAGSPTSTEEGTSESATPESGPGSEPATSGSETPASSTGVKITVVAGEHNIEETEHTEQKRNVIRIIPHHNYNAAINKYNHDIALLELDEPLVLNSYVTPICIADKEYTNIFLKFGSGYVSGWGRVFHKGRSALVLQYLRVPLVDRATCLLSTKFTIYNNMFCAGFHEGGRDSCQGDSGGPHVTEVEGTSFLTGIISWGEECAMKGKYGIYTKVSRYVNWIKEKTKLTGPEGPSKLTRAETGAGSPGAETAEQKLISEEDLSPATGHHHHHHHH

SEQ ID NO: 66 - protein, 549 aa, Artificial Sequence
  Description of Artificial Sequence: Synthetic pNL128
MQRVNMIMAESPGLITICLLGYLLSAECTVFLDHENANKILNRPKRYNSGKLEEFVQGNLERECMEEKCSFEEAREVFENTERTTEFWKQYVDGDQCESNPCLNGGSCKDDINSYECWCPFGFEGKNCELDVTCNIKNGRCEQFCKNSADNKVVCSCTEGYRLAENQKSCEPAVPFPCGRVSVSQTSKLTRAETVFPDVDYVNSTEAETILDNITQSTQSFNDFTRVVGGEDAKPGQFPWQVVLNGKVDAFCGGSIVNEKWIVTAAHCVETGVKITVVAGEHNIEEGAPGSPAGSPTSTEEGTSESATPESGPGSEPATSGSETPASSTEHTEQKRNVIRIIPHHNYNAAINKYNHDIALLELDEPLVLNSYVTPICIADKEYTNIFLKFGSGYVSGWGRVFHKGRSALVLQYLRVPLVDRATCLLSTKFTIYNNMFCAGFHEGGRDSCQGDSGGPHVTEVEGTSFLTGIISWGEECAMKGKYGIYTKVSRYVNWIKEKTKLTGPEGPSKLTRAETGAGSPGAETAEQKLISEEDLSPATGHHHHHHHH

SEQ ID NO: 67 - protein, 549 aa, Artificial Sequence
  Description of Artificial Sequence: Synthetic pNL129
MQRVNMIMAESPGLITICLLGYLLSAECTVFLDHENANKILNRPKRYNSGKLEEFVQGNLERECMEEKCSFEEAREVFENTERTTEFWKQYVDGDQCESNPCLNGGSCKDDINSYECWCPFGFEGKNCELDVTCNIKNGRCEQFCKNSADNKVVCSCTEGYRLAENQKSCEPAVPFPCGRVSVSQTSKLTRAETVFPDVDYVNSTEAETILDNITQSTQSFNDFTRVVGGEDAKPGQFPWQVVLNGKVDAFCGGSIVNEKWIVTAAHCVETGVKITVVAGEHNIEETEHTEQKRNVIRIIPHHGAPGSPAGSPTSTEEGTSESATPESGPGSEPATSGSETPASSNYNAAINKYNHDIALLELDEPLVLNSYVTPICIADKEYTNIFLKFGSGYVSGWGRVFHKGRSALVLQYLRVPLVDRATCLLSTKFTIYNNMFCAGFHEGGRDSCQGDSGGPHVTEVEGTSFLTGIISWGEECAMKGKYGIYTKVSRYVNWIKEKTKLTGPEGPSKLTRAETGAGSPGAETAEQKLISEEDLSPATGHHHHHHHH

SEQ ID NO: 68 - protein, 549 aa, Artificial Sequence
  Description of Artificial Sequence: Synthetic pNL130
MQRVNMIMAESPGLITICLLGYLLSAECTVFLDHENANKILNRPKRYNSGKLEEFVQGNLERECMEEKCSFEEAREVFENTERTTEFWKQYVDGDQCESNPCLNGGSCKDDINSYECWCPFGFEGKNCELDVTCNIKNGRCEQFCKNSADNKVVCSCTEGYRLAENQKSCEPAVPFPCGRVSVSQTSKLTRAETVFPDVDYVNSTEAETILDNITQSTQSFNDFTRVVGGEDAKPGQFPWQVVLNGKVDAFCGGSIVNEKWIVTAAHCVETGVKITVVAGEHNIEETEHTEQKRNVIRIIPHHNYNAAINKGAPGSPAGSPTSTEEGTSESATPESGPGSEPATSGSETPASSYNHDIALLELDEPLVLNSYVTPICIADKEYTNIFLKFGSGYVSGWGRVFHKGRSALVLQYLRVPLVDRATCLLSTKFTIYNNMFCAGFHEGGRDSCQGDSGGPHVTEVEGTSFLTGIISWGEECAMKGKYGIYTKVSRYVNWIKEKTKLTGPEGPSKLTRAETGAGSPGAETAEQKLISEEDLSPATGHHHHHHHH

SEQ ID NO: 69 - protein, 549 aa, Artificial Sequence
  Description of Artificial Sequence: Synthetic pNL131
MQRVNMIMAESPGLITICLLGYLLSAECTVFLDHENANKILNRPKRYNSGKLEEFVQGNLERECMEEKCSFEEAREVFENTERTTEFWKQYVDGDQCESNPCLNGGSCKDDINSYECWCPFGFEGKNCELDVTCNIKNGRCEQFCKNSADNKVVCSCTEGYRLAENQKSCEPAVPFPCGRVSVSQTSKLTRAETVFPDVDYVNSTEAETILDNITQSTQSFNDFTRVVGGEDAKPGQFPWQVVLNGKVDAFCGGSIVNEKWIVTAAHCVETGVKITVVAGEHNIEETEHTEQKRNVIRIIPHHNYNAAINKYNHDIALLELDEGAPGSPAGSPTSTEEGTSESATPESGPGSEPATSGSETPASSPLVLNSYVTPICIADKEYTNIFLKFGSGYVSGWGRVFHKGRSALVLQYLRVPLVDRATCLLSTKFTIYNNMFCAGFHEGGRDSCQGDSGGPHVTEVEGTSFLTGIISWGEECAMKGKYGIYTKVSRYVNWIKEKTKLTGPEGPSKLTRAETGAGSPGAETAEQKLISEEDLSPATGHHHHHHHH

SEQ ID NO: 70 - protein, 549 aa, Artificial Sequence
  Description of Artificial Sequence: Synthetic pNL132
MQRVNMIMAESPGLITICLLGYLLSAECTVFLDHENANKILNRPKRYNSGKLEEFVQGNLERECMEEKCSFEEAREVFENTERTTEFWKQYVDGDQCESNPCLNGGSCKDDINSYECWCPFGFEGKNCELDVTCNIKNGRCEQFCKNSADNKVVCSCTEGYRLAENQKSCEPAVPFPCGRVSVSQTSKLTRAETVFPDVDYVNSTEAETILDNITQSTQSFNDFTRVVGGEDAKPGQFPWQVVLNGKVDAFCGGSIVNEKWIVTAAHCVETGVKITVVAGEHNIEETEHTEQKRNVIRIIPHHNYNAAINKYNHDIALLELDEPLVLNSYVTPICIADGAPGSPAGSPTSTEEGTSESATPESGPGSEPATSGSETPASSKEYTNIFLKFGSGYVSGWGRVFHKGRSALVLQYLRVPLVDRATCLLSTKFTIYNNMFCAGFHEGGRDSCQGDSGGPHVTEVEGTSFLTGIISWGEECAMKGKYGIYTKVSRYVNWIKEKTKLTGPEGPSKLTRAETGAGSPGAETAEQKLISEEDLSPATGHHHHHHHH

SEQ ID NO: 71 - protein, 549 aa, Artificial Sequence
  Description of Artificial Sequence: Synthetic pNL133
MQRVNMIMAESPGLITICLLGYLLSAECTVFLDHENANKILNRPKRYNSGKLEEFVQGNLERECMEEKCSFEEAREVFENTERTTEFWKQYVDGDQCESNPCLNGGSCKDDINSYECWCPFGFEGKNCELDVTCNIKNGRCEQFCKNSADNKVVCSCTEGYRLAENQKSCEPAVPFPCGRVSVSQTSKLTRAETVFPDVDYVNSTEAETILDNITQSTQSFNDFTRVVGGEDAKPGQFPWQVVLNGKVDAFCGGSIVNEKWIVTAAHCVETGVKITVVAGEHNIEETEHTEQKRNVIRIIPHHNYNAAINKYNHDIALLELDEPLVLNSYVTPICIADKEYTNIFLKFGSGYVSGWGRVFHKGAPGSPAGSPTSTEEGTSESATPESGPGSEPATSGSETPASSGRSALVLQYLRVPLVDRATCLLSTKFTIYNNMFCAGFHEGGRDSCQGDSGGPHVTEVEGTSFLTGIISWGEECAMKGKYGIYTKVSRYVNWIKEKTKLTGPEGPSKLTRAETGAGSPGAETAEQKLISEEDLSPATGHHHHHHHH

SEQ ID NO: 72 - protein, 549 aa, Artificial Sequence
  Description of Artificial Sequence: Synthetic pNL134
MQRVNMIMAESPGLITICLLGYLLSAECTVFLDHENANKILNRPKRYNSGKLEEFVQGNLERECMEEKCSFEEAREVFENTERTTEFWKQYVDGDQCESNPCLNGGSCKDDINSYECWCPFGFEGKNCELDVTCNIKNGRCEQFCKNSADNKVVCSCTEGYRLAENQKSCEPAVPFPCGRVSVSQTSKLTRAETVFPDVDYVNSTEAETILDNITQSTQSFNDFTRVVGGEDAKPGQFPWQVVLNGKVDAFCGGSIVNEKWIVTAAHCVETGVKITVVAGEHNIEETEHTEQKRNVIRIIPHHNYNAAINKYNHDIALLELDEPLVLNSYVTPICIADKEYTNIFLKFGSGYVSGWGRVFHKGRSALVLQYLRVPLVDRATCLLSTKGAPGSPAGSPTSTEEGTSESATPESGPGSEPATSGSETPASSFTIYNNMFCAGFHEGGRDSCQGDSGGPHVTEVEGTSFLTGIISWGEECAMKGKYGIYTKVSRYVNWIKEKTKLTGPEGPSKLTRAETGAGSPGAETAEQKLISEEDLSPATGHHHHHHHH

SEQ ID NO: 73 - protein, 549 aa, Artificial Sequence
  Description of Artificial Sequence: Synthetic pNL135
MQRVNMIMAESPGLITICLLGYLLSAECTVFLDHENANKILNRPKRYNSGKLEEFVQGNLERECMEEKCSFEEAREVFENTERTTEFWKQYVDGDQCESNPCLNGGSCKDDINSYECWCPFGFEGKNCELDVTCNIKNGRCEQFCKNSADNKVVCSCTEGYRLAENQKSCEPAVPFPCGRVSVSQTSKLTRAETVFPDVDYVNSTEAETILDNITQSTQSFNDFTRVVGGEDAKPGQFPWQVVLNGKVDAFCGGSIVNEKWIVTAAHCVETGVKITVVAGEHNIEETEHTEQKRNVIRIIPHHNYNAAINKYNHDIALLELDEPLVLNSYVTPICIADKEYTNIFLKFGSGYVSGWGRVFHKGRSALVLQYLRVPLVDRATCLLSTKFTIYNNMFCAGFHGAPGSPAGSPTSTEEGTSESATPESGPGSEPATSGSETPASSEGGRDSCQGDSGGPHVTEVEGTSFLTGIISWGEECAMKGKYGIYTKVSRYVNWIKEKTKLTGPEGPSKLTRAETGAGSPGAETAEQKLISEEDLSPATGHHHHHHHH

SEQ ID NO: 74 - protein, 549 aa, Artificial Sequence
  Description of Artificial Sequence: Synthetic pNL136
MQRVNMIMAESPGLITICLLGYLLSAECTVFLDHENANKILNRPKRYNSGKLEEFVQGNLERECMEEKCSFEEAREVFENTERTTEFWKQYVDGDQCESNPCLNGGSCKDDINSYECWCPFGFEGKNCELDVTCNIKNGRCEQFCKNSADNKVVCSCTEGYRLAENQKSCEPAVPFPCGRVSVSQTSKLTRAETVFPDVDYVNSTEAETILDNITQSTQSFNDFTRVVGGEDAKPGQFPWQVVLNGKVDAFCGGSIVNEKWIVTAAHCVETGVKITVVAGEHNIEETEHTEQKRNVIRIIPHHNYNAAINKYNHDIALLELDEPLVLNSYVTPICIADKEYTNIFLKFGSGYVSGWGRVFHKGRSALVLQYLRVPLVDRATCLLSTKFTIYNNMFCAGFHEGGRDSCQGDSGGPHVTEVEGTSFLTGIISWGEECAMKGAPGSPAGSPTSTEEGTSESATPESGPGSEPATSGSETPASSGKYGIYTKVSRYVNWIKEKTKLTGPEGPSKLTRAETGAGSPGAETAEQKLISEEDLSPATGHHHHHHHH

SEQ ID NO: 75 - protein, 549 aa, Artificial Sequence
  Description of Artificial Sequence: Synthetic pNL137
MQRVNMIMAESPGLITICLLGYLLSAECTVFLDHENANKILNRPKRYNSGKLEEFVQGNLERECMEEKCSFEEAREVFENTERTTEFWKQYVDGDQCESNPCLNGGSCKDDINSYECWCPFGFEGKNCELDVTCNIKNGRCEQFCKNSADNKVVCSCTEGYRLAENQKSCEPAVPFPCGRVSVSQTSKLTRAETVFPDVDYVNSTEAETILDNITQSTQSFNDFTRVVGGEDAKPGQFPWQVVLNGKVDAFCGGSIVNEKWIVTAAHCVETGVKITVVAGEHNIEETEHTEQKRNVIRIIPHHNYNAAINKYNHDIALLELDEPLVLNSYVTPICIADKEYTNIFLKFGSGYVSGWGRVFHKGRSALVLQYLRVPLVDRATCLLSTKFTIYNNMFCAGFHEGGRDSCQGDSGGPHVTEVEGTSFLTGIISWGEECAMKGKYGIYTKVSRGAPGSPAGSPTSTEEGTSESATPESGPGSEPATSGSETPASSYVNWIKEKTKLTGPEGPSKLTRAETGAGSPGAETAEQKLISEEDLSPATGHHHHHHHH

SEQ ID NO: 76 - protein, 549 aa, Artificial Sequence
  Description of Artificial Sequence: Synthetic pNL138
MQRVNMIMAESPGLITICLLGYLLSAECTVFLDHENANKILNRPKRYNSGKLEEFVQGNLERECMEEKCSFEEAREVFENTERTTEFWKQYVDGDQCESNPCLNGGSCKDDINSYECWCPFGFEGKNCELDVTCNIKNGRCEQFCKNSADNKVVCSCTEGYRLAENQKSCEPAVPFPCGRVSVSQTSKLTRAETVFPDVDYVNSTEAETILDNITQSTQSFNDFTRVVGGEDAKPGQFPWQVVLNGKVDAFCGGSIVNEKWIVTAAHCVETGVKITVVAGEHNIEETEHTEQKRNVIRIIPHHNYNAAINKYNHDIALLELDEPLVLNSYVTPICIADKEYTNIFLKFGSGYVSGWGRVFHKGRSALVLQYLRVPLVDRATCLLSTKFTIYNNMFCAGFHEGGRDSCQGDSGGPHVTEVEGTSFLTGIISWGEECAMKGKYGIYTKVSRYVNWIKEKTKGAPGSPAGSPTSTEEGTSESATPESGPGSEPATSGSETPASSLTGPEGPSKLTRAETGAGSPGAETAEQKLISEEDLSPATGHHHHHHHH

SEQ ID NO: 77 - protein, 575 aa, Artificial Sequence
  Description of Artificial Sequence: Synthetic pNL140
MQRVNMIMAESPGLITICLLGYLLSAECTVFLDHENANKILNRPKRYNSGKLEEFVQGNLERECMEEKCSFEEAREVFENTERTTEFWKQYVDGDQCESNPCLNGGSCKDDINSYECWCPFGFEGKNCELDVTCNIKNGRCEQFCKNSADNKVVCSCTEGYRLAENQKSCEPAVPFPCGRVSVSQTSKLTRAETVFPDVDYVNSTEAETILDNITQSTQSFNDFTRVVGGEDAKPGQFPWQVVLNGKVDAFCGGSIVNEKWIVTAAHCVETGVKITVVAGEHNIEETEHTEQKRNVIRIIPHHNYNAAINKYNHDIALLELDEPLVLNSYVTPICIADKEYTNIFLKFGSGYVSGWGRVFHKGRSALVLQYLRVPLVDRATCLLSTKFTIYNNMFCAGFHEGGRDSCQGDSGGPHVTEVEGTSFLTGIISWGEECAMKGKYGIYTKVSRYVNWIKEKTKLTGAGSPGAETALVPRSFLLRNPNDKYEPFWEDEESGAGSPGAETAGAPGSPAGSPTSTEEGTSESATPESGPGSEPATSGSETPASSGAETAEQKLISEEDLSPATGHHHHHHHH

SEQ ID NO: 78 - protein, 549 aa, Artificial Sequence
  Description of Artificial Sequence: Synthetic pNL141
MQRVNMIMAESPGLITICLLGYLLSAECTVFLDHENANKILNRPKRYNSGKLEEFVQGNLERECMEEKCSFEEAREVFENTERTTEFWKQYVDGDQCEGAPGSPAGSPTSTEEGTSESATPESGPGSEPATSGSETPASSSNPCLNGGSCKDDINSYECWCPFGFEGKNCELDVTCNIKNGRCEQFCKNSADNKVVCSCTEGYRLAENQKSCEPAVPFPCGRVSVSQTSKLTRAETVFPDVDYVNSTEAETILDNITQSTQSFNDFTRVVGGEDAKPGQFPWQVVLNGKVDAFCGGSIVNEKWIVTAAHCVETGVKITVVAGEHNIEETEHTEQKRNVIRIIPHHNYNAAINKYNHDIALLELDEPLVLNSYVTPICIADKEYTNIFLKFGSGYVSGWGRVFHKGRSALVLQYLRVPLVDRATCLLSTKFTIYNNMFCAGFHEGGRDSCQGDSGGPHVTEVEGTSFLTGIISWGEECAMKGKYGIYTKVSRYVNWIKEKTKLTGPEGPSKLTRAETGAGSPGAETAEQKLISEEDLSPATGHHHHHHHH

SEQ ID NO: 79 - protein, 549 aa, Artificial Sequence
  Description of Artificial Sequence: Synthetic pNL142
MQRVNMIMAESPGLITICLLGYLLSAECTVFLDHENANKILNRPKRYNSGKLEEFVQGNLERECMEEKCSFEEAREVFENTERTTEFWKQYVDGDQCESNPCLNGGAPGSPAGSPTSTEEGTSESATPESGPGSEPATSGSETPASSGSCKDDINSYECWCPFGFEGKNCELDVTCNIKNGRCEQFCKNSADNKVVCSCTEGYRLAENQKSCEPAVPFPCGRVSVSQTSKLTRAETVFPDVDYVNSTEAETILDNITQSTQSFNDFTRVVGGEDAKPGQFPWQVVLNGKVDAFCGGSIVNEKWIVTAAHCVETGVKITVVAGEHNIEETEHTEQKRNVIRIIPHHNYNAAINKYNHDIALLELDEPLVLNSYVTPICIADKEYTNIFLKFGSGYVSGWGRVFHKGRSALVLQYLRVPLVDRATCLLSTKFTIYNNMFCAGFHEGGRDSCQGDSGGPHVTEVEGTSFLTGIISWGEECAMKGKYGIYTKVSRYVNWIKEKTKLTGPEGPSKLTRAETGAGSPGAETAEQKLISEEDLSPATGHHHHHHHH

SEQ ID NO: 80 - protein, 549 aa, Artificial Sequence
  Description of Artificial Sequence: Synthetic pNL143
MQRVNMIMAESPGLITICLLGYLLSAECTVFLDHENANKILNRPKRYNSGKLEEFVQGNLERECMEEKCSFEEAREVFENTERTTEFWKQYVDGDQCESNPCLNGGSCKDDIGAPGSPAGSPTSTEEGTSESATPESGPGSEPATSGSETPASSNSYECWCPFGFEGKNCELDVTCNIKNGRCEQFCKNSADNKVVCSCTEGYRLAENQKSCEPAVPFPCGRVSVSQTSKLTRAETVFPDVDYVNSTEAETILDNITQSTQSFNDFTRVVGGEDAKPGQFPWQVVLNGKVDAFCGGSIVNEKWIVTAAHCVETGVKITVVAGEHNIEETEHTEQKRNVIRIIPHHNYNAAINKYNHDIALLELDEPLVLNSYVTPICIADKEYTNIFLKFGSGYVSGWGRVFHKGRSALVLQYLRVPLVDRATCLLSTKFTIYNNMFCAGFHEGGRDSCQGDSGGPHVTEVEGTSFLTGIISWGEECAMKGKYGIYTKVSRYVNWIKEKTKLTGPEGPSKLTRAETGAGSPGAETAEQKLISEEDLSPATGHHHHHHHH

SEQ ID NO: 81 - protein, 549 aa, Artificial Sequence
  Description of Artificial Sequence: Synthetic pNL144
MQRVNMIMAESPGLITICLLGYLLSAECTVFLDHENANKILNRPKRYNSGKLEEFVQGNLERECMEEKCSFEEAREVFENTERTTEFWKQYVDGDQCESNPCLNGGSCKDDINSYECWCPFGFEGKGAPGSPAGSPTSTEEGTSESATPESGPGSEPATSGSETPASSNCELDVTCNIKNGRCEQFCKNSADNKVVCSCTEGYRLAENQKSCEPAVPFPCGRVSVSQTSKLTRAETVFPDVDYVNSTEAETILDNITQSTQSFNDFTRVVGGEDAKPGQFPWQVVLNGKVDAFCGGSIVNEKWIVTAAHCVETGVKITVVAGEHNIEETEHTEQKRNVIRIIPHHNYNAAINKYNHDIALLELDEPLVLNSYVTPICIADKEYTNIFLKFGSGYVSGWGRVFHKGRSALVLQYLRVPLVDRATCLLSTKFTIYNNMFCAGFHEGGRDSCQGDSGGPHVTEVEGTSFLTGIISWGEECAMKGKYGIYTKVSRYVNWIKEKTKLTGPEGPSKLTRAETGAGSPGAETAEQKLISEEDLSPATGHHHHHHHH

SEQ ID NO: 82 - protein, 549 aa, Artificial Sequence
  Description of Artificial Sequence: Synthetic pNL145
MQRVNMIMAESPGLITICLLGYLLSAECTVFLDHENANKILNRPKRYNSGKLEEFVQGNLERECMEEKCSFEEAREVFENTERTTEFWKQYVDGDQCESNPCLNGGSCKDDINSYECWCPFGFEGKNCELDGAPGSPAGSPTSTEEGTSESATPESGPGSEPATSGSETPASSVTCNIKNGRCEQFCKNSADNKVVCSCTEGYRLAENQKSCEPAVPFPCGRVSVSQTSKLTRAETVFPDVDYVNSTEAETILDNITQSTQSFNDFTRVVGGEDAKPGQFPWQVVLNGKVDAFCGGSIVNEKWIVTAAHCVETGVKITVVAGEHNIEETEHTEQKRNVIRIIPHHNYNAAINKYNHDIALLELDEPLVLNSYVTPICIADKEYTNIFLKFGSGYVSGWGRVFHKGRSALVLQYLRVPLVDRATCLLSTKFTIYNNMFCAGFHEGGRDSCQGDSGGPHVTEVEGTSFLTGIISWGEECAMKGKYGIYTKVSRYVNWIKEKTKLTGPEGPSKLTRAETGAGSPGAETAEQKLISEEDLSPATGHHHHHHHH

SEQ ID NO: 83 - protein, 683 aa, Artificial Sequence
  Description of Artificial Sequence: Synthetic pNL164
MQRVNMIMAESPGLITICLLGYLLSAECTVFLDHENANKILNRPKRYNSGKLEEFVQGNLERECMEEKCSFEEAREVFENTERTTEFWKQYVDGDQCESNPCLNGGSCKDDINSYECWCPFGFEGKNCELDVTCNIKNGRCEQFCKNSADNKVVCSCTEGYRLAENQKSCEPAVPFPCGRVSVSQTSKLTRAETVFPDVDYVNSTEAETILDNITQSTQSFNDFTRVVGGEDAKPGQFPWQVVLNGKVDAFCGGSIVNEKWIVTAAHCVETGVKITVVAGEHNIEETEHTEQKRNVIRIIPHHNYNAAINKYNHDIALLELDEPLVLNSYVTPICIADKEYTNIFLKFGSGYVSGWGRVFHKGRSALVLQYLRVPLVDRATCLLSTKFTIYNNMFCAGFHEGGRDSCQGDSGGPHVTEVEGTSFLTGIISWGEECAMKGKYGIYTKVSRYVNWIKEKTKLTGAGSPGAETALVPRSFLLRNPNDKYEPFWEDEESGAGSPGAETAGAPTSTEPSEGSAPGTSESATPESGPGTSESATPESGPGTSESATPESGPGSEPATSGSETPGSEPATSGSETPGSPAGSPTSTEEGTSTEPSEGSAPGTSTEPSEGSAPGSEPATSGSETPGTSESATPESGPGTSTEPSEGSAPGASSGAETAEQKLISEEDLSPATGHHHHHHHH

SEQ ID NO: 84 - protein, 827 aa, Artificial Sequence
  Description of Artificial Sequence: Synthetic pNL165
MQRVNMIMAESPGLITICLLGYLLSAECTVFLDHENANKILNRPKRYNSGKLEEFVQGNLERECMEEKCSFEEAREVFENTERTTEFWKQYVDGDQCESNPCLNGGSCKDDINSYECWCPFGFEGKNCELDVTCNIKNGRCEQFCKNSADNKVVCSCTEGYRLAENQKSCEPAVPFPCGRVSVSQTSKLTRAETVFPDVDYVNSTEAETILDNITQSTQSFNDFTRVVGGEDAKPGQFPWQVVLNGKVDAFCGGSIVNEKWIVTAAHCVETGVKITVVAGEHNIEETEHTEQKRNVIRIIPHHNYNAAINKYNHDIALLELDEPLVLNSYVTPICIADKEYTNIFLKFGSGYVSGWGRVFHKGRSALVLQYLRVPLVDRATCLLSTKFTIYNNMFCAGFHEGGRDSCQGDSGGPHVTEVEGTSFLTGIISWGEECAMKGKYGIYTKVSRYVNWIKEKTKLTGAGSPGAETALVPRSFLLRNPNDKYEPFWEDEESGAGSPGAETAGAPGTSESATPESGPGSEPATSGSETPGTSESATPESGPGSEPATSGSETPGTSESATPESGPGTSTEPSEGSAPGSPAGSPTSTEEGTSESATPESGPGSEPATSGSETPGTSESATPESGPGSPAGSPTSTEEGSPAGSPTSTEEGTSTEPSEGSAPGTSESATPESGPGTSESATPESGPGTSESATPESGPGSEPATSGSETPGSEPATSGSETPGSPAGSPTSTEEGTSTEPSEGSAPGTSTEPSEGSAPGSEPATSGSETPGTSESATPESGPGTSTEPSEGSAPASSGAETAEQKLISEEDLSPATGHHHHHHHH

SEQ ID NO: 85 - protein, 1403 aa, Artificial Sequence
  Description of Artificial Sequence: Synthetic pNL166
MQRVNMIMAESPGLITICLLGYLLSAECTVFLDHENANKILNRPKRYNSGKLEEFVQGNLERECMEEKCSFEEAREVFENTERTTEFWKQYVDGDQCESNPCLNGGSCKDDINSYECWCPFGFEGKNCELDVTCNIKNGRCEQFCKNSADNKVVCSCTEGYRLAENQKSCEPAVPFPCGRVSVSQTSKLTRAETVFPDVDYVNSTEAETILDNITQSTQSFNDFTRVVGGEDAKPGQFPWQVVLNGKVDAFCGGSIVNEKWIVTAAHCVETGVKITVVAGEHNIEETEHTEQKRNVIRIIPHHNYNAAINKYNHDIALLELDEPLVLNSYVTPICIADKEYTNIFLKFGSGYVSGWGRVFHKGRSALVLQYLRVPLVDRATCLLSTKFTIYNNMFCAGFHEGGRDSCQGDSGGPHVTEVEGTSFLTGIISWGEECAMKGKYGIYTKVSRYVNWIKEKTKLTGAGSPGAETALVPRSFLLRNPNDKYEPFWEDEESGAGSPGAETAGAPGSPAGSPTSTEEGTSESATPESGPGTSTEPSEGSAPGSPAGSPTSTEEGTSTEPSEGSAPGTSTEPSEGSAPGTSESATPESGPGSEPATSGSETPGSEPATSGSETPGSPAGSPTSTEEGTSESATPESGPGTSTEPSEGSAPGTSTEPSEGSAPGSPAGSPTSTEEGTSTEPSEGSAPGTSTEPSEGSAPGTSESATPESGPGTSTEPSEGSAPGTSESATPESGPGSEPATSGSETPGTSTEPSEGSAPGTSTEPSEGSAPGTSESATPESGPGTSESATPESGPGSPAGSPTSTEEGTSESATPESGPGSEPATSGSETPGTSESATPESGPGTSTEPSEGSAPGTSTEPSEGSAPGTSTEPSEGSAPGTSTEPSEGSAPGTSTEPSEGSAPGTSTEPSEGSAPGSPAGSPTSTEEGTSTEPSEGSAPGTSESATPESGPGSEPATSGSETPGTSESATPESGPGSEPATSGSETPGTSESATPESGPGTSTEPSEGSAPGTSESATPESGPGSPAGSPTSTEEGSPAGSPTSTEEGSPAGSPTSTEEGTSESATPESGPGTSTEPSEGSAPGTSESATPESGPGSEPATSGSETPGTSESATPESGPGSEPATSGSETPGTSESATPESGPGTSTEPSEGSAPGSPAGSPTSTEEGTSESATPESGPGSEPATSGSETPGTSESATPESGPGSPAGSPTSTEEGSPAGSPTSTEEGTSTEPSEGSAPGTSESATPESGPGTSESATPESGPGTSESATPESGPGSEPATSGSETPGSEPATSGSETPGSPAGSPTSTEEGTSTEPSEGSAPGTSTEPSEGSAPGSEPATSGSETPGTSESATPESGPGTSTEPSEGSAPASSGAETAEQKLISEEDLSPATGHHHHHHHH

SEQ ID NO: 86 - protein, 585 aa, Artificial Sequence
  Description of Artificial Sequence: Synthetic pNL167
MQRVNMIMAESPGLITICLLGYLLSAECTVFLDHENANKILNRPKRYNSGKLEEFVQGNLERECMEEKCSFEEAREVFENTERTTEFWKQYVDGDQCESNPCLNGGSCKDDINSYECWCPFGFEGKNCELDVTCNIKNGRCEQFCKNSADNKVVCSCTEGYRLAENQKSCEPAVPFPCGRVSVSQTSKGAPSPAGSPTSTEEGTSESATPESGPGSEPATSGSETPGTSESATPESGPGTSTEPSEGSAPGTSTEPSEGSAPGASSLTRAETVFPDVDYVNSTEAETILDNITQSTQSFNDFTRVVGGEDAKPGQFPWQVVLNGKVDAFCGGSIVNEKWIVTAAHCVETGVKITVVAGEHNIEETEHTEQKRNVIRIIPHHNYNAAINKYNHDIALLELDEPLVLNSYVTPICIADKEYTNIFLKFGSGYVSGWGRVFHKGRSALVLQYLRVPLVDRATCLLSTKFTIYNNMFCAGFHEGGRDSCQGDSGGPHVTEVEGTSFLTGIISWGEECAMKGKYGIYTKVSRYVNWIKEKTKLTGPEGPSKLTRAETGAGSPGAETAEQKLISEEDLSPATGHHHHHHHH

SEQ ID NO: 87 - protein, 657 aa, Artificial Sequence
  Description of Artificial Sequence: Synthetic pNL168
MQRVNMIMAESPGLITICLLGYLLSAECTVFLDHENANKILNRPKRYNSGKLEEFVQGNLERECMEEKCSFEEAREVFENTERTTEFWKQYVDGDQCESNPCLNGGSCKDDINSYECWCPFGFEGKNCELDVTCNIKNGRCEQFCKNSADNKVVCSCTEGYRLAENQKSCEPAVPFPCGRVSVSQTSKGAPSPAGSPTSTEEGTSESATPESGPGSEPATSGSETPGTSESATPESGPGTSTEPSEGSAPGTSTEPSEGSAPGTSTEPSEGSAPGTSTEPSEGSAPGTSTEPSEGSAPGTSTEPSEGSAPGSPAGSPTSTEEGTSTEPSEGSAPGASSLTRAETVFPDVDYVNSTEAETILDNITQSTQSFNDFTRVVGGEDAKPGQFPWQVVLNGKVDAFCGGSIVNEKWIVTAAHCVETGVKITVVAGEHNIEETEHTEQKRNVIRIIPHHNYNAAINKYNHDIALLELDEPLVLNSYVTPICIADKEYTNIFLKFGSGYVSGWGRVFHKGRSALVLQYLRVPLVDRATCLLSTKFTIYNNMFCAGFHEGGRDSCQGDSGGPHVTEVEGTSFLTGIISWGEECAMKGKYGIYTKVSRYVNWIKEKTKLTGPEGPSKLTRAETGAGSPGAETAEQKLISEEDLSPATGHHHHHHHH

SEQ ID NO: 88 - protein, 801 aa, Artificial Sequence
  Description of Artificial Sequence: Synthetic pNL169
MQRVNMIMAESPGLITICLLGYLLSAECTVFLDHENANKILNRPKRYNSGKLEEFVQGNLERECMEEKCSFEEAREVFENTERTTEFWKQYVDGDQCESNPCLNGGSCKDDINSYECWCPFGFEGKNCELDVTCNIKNGRCEQFCKNSADNKVVCSCTEGYRLAENQKSCEPAVPFPCGRVSVSQTSKGAPGTSESATPESGPGSEPATSGSETPGTSESATPESGPGSEPATSGSETPGTSESATPESGPGTSTEPSEGSAPGSPAGSPTSTEEGTSESATPESGPGSEPATSGSETPGTSESATPESGPGSPAGSPTSTEEGSPAGSPTSTEEGTSTEPSEGSAPGTSESATPESGPGTSESATPESGPGTSESATPESGPGSEPATSGSETPGSEPATSGSETPGSPAGSPTSTEEGTSTEPSEGSAPGTSTEPSEGSAPGSEPATSGSETPGTSESATPESGPGTSTEPSEGSAPASSLTRAETVFPDVDYVNSTEAETILDNITQSTQSFNDFTRVVGGEDAKPGQFPWQVVLNGKVDAFCGGSIVNEKWIVTAAHCVETGVKITVVAGEHNIEETEHTEQKRNVIRIIPHHNYNAAINKYNHDIALLELDEPLVLNSYVTPICIADKEYTNIFLKFGSGYVSGWGRVFHKGRSALVLQYLRVPLVDRATCLLSTKFTIYNNMFCAGFHEGGRDSCQGDSGGPHVTEVEGTSFLTGIISWGEECAMKGKYGIYTKVSRYVNWIKEKTKLTGPEGPSKLTRAETGAGSPGAETAEQKLISEEDLSPATGHHHHHHHH

SEQ ID NO: 89 - protein, 585 aa, Artificial Sequence
  Description of Artificial Sequence: Synthetic pNL170
MQRVNMIMAESPGLITICLLGYLLSAECTVFLDHENANKILNRPKRYNSGKLEEFVQGNLERECMEEKCSFEEAREVFENTERTTEFWKQYVDGDQCESNPCLNGGSCKDDINSYECWCPFGFEGKNCELDVTCNIKNGRCEQFCKNSADNKVVCSCTEGYRLAENQKSCEPAVPFPCGRVSVSQTSKLTRAETVGAPSPAGSPTSTEEGTSESATPESGPGSEPATSGSETPGTSESATPESGPGTSTEPSEGSAPGTSTEPSEGSAPGASSFPDVDYVNSTEAETILDNITQSTQSFNDFTRVVGGEDAKPGQFPWQVVLNGKVDAFCGGSIVNEKWIVTAAHCVETGVKITVVAGEHNIEETEHTEQKRNVIRIIPHHNYNAAINKYNHDIALLELDEPLVLNSYVTPICIADKEYTNIFLKFGSGYVSGWGRVFHKGRSALVLQYLRVPLVDRATCLLSTKFTIYNNMFCAGFHEGGRDSCQGDSGGPHVTEVEGTSFLTGIISWGEECAMKGKYGIYTKVSRYVNWIKEKTKLTGPEGPSKLTRAETGAGSPGAETAEQKLISEEDLSPATGHHHHHHHH

SEQ ID NO: 90 - protein, 657 aa, Artificial Sequence
  Description of Artificial Sequence: Synthetic pNL171
MQRVNMIMAESPGLITICLLGYLLSAECTVFLDHENANKILNRPKRYNSGKLEEFVQGNLERECMEEKCSFEEAREVFENTERTTEFWKQYVDGDQCESNPCLNGGSCKDDINSYECWCPFGFEGKNCELDVTCNIKNGRCEQFCKNSADNKVVCSCTEGYRLAENQKSCEPAVPFPCGRVSVSQTSKLTRAETVGAPSPAGSPTSTEEGTSESATPESGPGSEPATSGSETPGTSESATPESGPGTSTEPSEGSAPGTSTEPSEGSAPGTSTEPSEGSAPGTSTEPSEGSAPGTSTEPSEGSAPGTSTEPSEGSAPGSPAGSPTSTEEGTSTEPSEGSAPGASSFPDVDYVNSTEAETILDNITQSTQSFNDFTRVVGGEDAKPGQFPWQVVLNGKVDAFCGGSIVNEKWIVTAAHCVETGVKITVVAGEHNIEETEHTEQKRNVIRIIPHHNYNAAINKYNHDIALLELDEPLVLNSYVTPICIADKEYTNIFLKFGSGYVSGWGRVFHKGRSALVLQYLRVPLVDRATCLLSTKFTIYNNMFCAGFHEGGRDSCQGDSGGPHVTEVEGTSFLTGIISWGEECAMKGKYGIYTKVSRYVNWIKEKTKLTGPEGPSKLTRAETGAGSPGAETAEQKLISEEDLSPATGHHHHHHHH

SEQ ID NO: 91 - protein, 801 aa, Artificial Sequence
  Description of Artificial Sequence: Synthetic pNL172
MQRVNMIMAESPGLITICLLGYLLSAECTVFLDHENANKILNRPKRYNSGKLEEFVQGNLERECMEEKCSFEEAREVFENTERTTEFWKQYVDGDQCESNPCLNGGSCKDDINSYECWCPFGFEGKNCELDVTCNIKNGRCEQFCKNSADNKVVCSCTEGYRLAENQKSCEPAVPFPCGRVSVSQTSKLTRAETVGAPGTSESATPESGPGSEPATSGSETPGTSESATPESGPGSEPATSGSETPGTSESATPESGPGTSTEPSEGSAPGSPAGSPTSTEEGTSESATPESGPGSEPATSGSETPGTSESATPESGPGSPAGSPTSTEEGSPAGSPTSTEEGTSTEPSEGSAPGTSESATPESGPGTSESATPESGPGTSESATPESGPGSEPATSGSETPGSEPATSGSETPGSPAGSPTSTEEGTSTEPSEGSAPGTSTEPSEGSAPGSEPATSGSETPGTSESATPESGPGTSTEPSEGSAPASSFPDVDYVNSTEAETILDNITQSTQSFNDFTRVVGGEDAKPGQFPWQVVLNGKVDAFCGGSIVNEKWIVTAAHCVETGVKITVVAGEHNIEETEHTEQKRNVIRIIPHHNYNAAINKYNHDIALLELDEPLVLNSYVTPICIADKEYTNIFLKFGSGYVSGWGRVFHKGRSALVLQYLRVPLVDRATCLLSTKFTIYNNMFCAGFHEGGRDSCQGDSGGPHVTEVEGTSFLTGIISWGEECAMKGKYGIYTKVSRYVNWIKEKTKLTGPEGPSKLTRAETGAGSPGAETAEQKLISEEDLSPATGHHHHHHHH

SEQ ID NO: 92 - protein, 585 aa, Artificial Sequence
  Description of Artificial Sequence: Synthetic pNL173
MQRVNMIMAESPGLITICLLGYLLSAECTVFLDHENANKILNRPKRYNSGKLEEFVQGNLERECMEEKCSFEEAREVFENTERTTEFWKQYVDGDQCESNPCLNGGSCKDDINSYECWCPFGFEGKNCELDVTCNIKNGRCEQFCKNSADNKVVCSCTEGYRLAENQKSCEPAVPFPCGRVSVSQTSKLTRAETVFPDVDYVNSTEAEGAPSPAGSPTSTEEGTSESATPESGPGSEPATSGSETPGTSESATPESGPGTSTEPSEGSAPGTSTEPSEGSAPGASSTILDNITQSTQSFNDFTRVVGGEDAKPGQFPWQVVLNGKVDAFCGGSIVNEKWIVTAAHCVETGVKITVVAGEHNIEETEHTEQKRNVIRIIPHHNYNAAINKYNHDIALLELDEPLVLNSYVTPICIADKEYTNIFLKFGSGYVSGWGRVFHKGRSALVLQYLRVPLVDRATCLLSTKFTIYNNMFCAGFHEGGRDSCQGDSGGPHVTEVEGTSFLTGIISWGEECAMKGKYGIYTKVSRYVNWIKEKTKLTGPEGPSKLTRAETGAGSPGAETAEQKLISEEDLSPATGHHHHHHHH

SEQ ID NO: 93 - protein, 657 aa, Artificial Sequence
  Description of Artificial Sequence: Synthetic pNL174
MQRVNMIMAESPGLITICLLGYLLSAECTVFLDHENANKILNRPKRYNSGKLEEFVQGNLERECMEEKCSFEEAREVFENTERTTEFWKQYVDGDQCESNPCLNGGSCKDDINSYECWCPFGFEGKNCELDVTCNIKNGRCEQFCKNSADNKVVCSCTEGYRLAENQKSCEPAVPFPCGRVSVSQTSKLTRAETVFPDVDYVNSTEAEGAPSPAGSPTSTEEGTSESATPESGPGSEPATSGSETPGTSESATPESGPGTSTEPSEGSAPGTSTEPSEGSAPGTSTEPSEGSAPGTSTEPSEGSAPGTSTEPSEGSAPGTSTEPSEGSAPGSPAGSPTSTEEGTSTEPSEGSAPGASSTILDNITQSTQSFNDFTRVVGGEDAKPGQFPWQVVLNGKVDAFCGGSIVNEKWIVTAAHCVETGVKITVVAGEHNIEETEHTEQKRNVIRIIPHHNYNAAINKYNHDIALLELDEPLVLNSYVTPICIADKEYTNIFLKFGSGYVSGWGRVFHKGRSALVLQYLRVPLVDRATCLLSTKFTIYNNMFCAGFHEGGRDSCQGDSGGPHVTEVEGTSFLTGIISWGEECAMKGKYGIYTKVSRYVNWIKEKTKLTGPEGPSKLTRAETGAGSPGAETAEQKLISEEDLSPATGHHHHHHHH

SEQ ID NO: 94 - protein, 800 aa, Artificial Sequence
  Description of Artificial Sequence: Synthetic pNL175
MQRVNMIMAESPGLITICLLGYLLSAECTVFLDHENANKILNRPKRYNSGKLEEFVQGNLERECMEEKCSFEEAREVFENTERTTEFWKQYVDGDQCESNPCLNGGSCKDDINSYECWCPFGFEGKNCELDVTCNIKNGRCEQFCKNSADNKVVCSCTEGYRLAENQKSCEPAVPFPCGRVSVSQTSKLTRAETVFPDVDYVNSTEAEGAPGTSESATPESGPGSEPATSGSETPGTSESATPESGPGSEPATSGSETPGTSESATPESGPGTSTEPSEGSAPGSPAGSPTSTEEGTSESATPESGPGSEPATSGSETPGTSESATPESGPGSPAGSPTSTEEGSPAGSPTSTEEGTSTEPSEGSAPGTSESATPESGPGTSESATPESGPGTSESATPESGPGSEPATSGSETPGSEPATSGSETPGSPAGSPTSTEEGTSTEPSEGSAPGTSTEPSEGSAPGSEPATSGSETPGTSESATPESGPGTSTEPSEGSAPASSTILDNITQSTQSFNDFTRVVGGEDAKPGQFPWQVVLNGKVDAFCGGSIVNEKWIVTAAHCVETGVKITVVAGEHNIEETEHTEQKRNVIRIIPHHNYNAAINKYNHDIALLELDEPLVLNSYVTPICIADKEYTNIFLKFGSGYVSGWGRVFHKGRSALVLQYLRVPLVDRATCLLSTKFTIYNNMFCAGFHEGGRDSCQGDSGGPHVTEVEGTSFLTGIISWGEECAMKGKYGIYTKVSRYVNWIKEKTKLTGPEGPSKLTRAETGAGSPGAETAEQKLISEEDLSPATGHHHHHHH

SEQ ID NO: 95 - protein, 585 aa, Artificial Sequence
  Description of Artificial Sequence: Synthetic pNL176
MQRVNMIMAESPGLITICLLGYLLSAECTVFLDHENANKILNRPKRYNSGKLEEFVQGNLERECMEEKCSFEEAREVFENTERTTEFWKQYVDGDQCESNPCLNGGSCKDDINSYECWCPFGFEGKNCELDVTCNIKNGRCEQFCKNSADNKVVCSCTEGYRLAENQKSCEPAVPFPCGRVSVSQTSKLTRAETVFPDVDYVNSTEAETILDGAPSPAGSPTSTEEGTSESATPESGPGSEPATSGSETPGTSESATPESGPGTSTEPSEGSAPGTSTEPSEGSAPGASSNITQSTQSFNDFTRVVGGEDAKPGQFPWQVVLNGKVDAFCGGSIVNEKWIVTAAHCVETGVKITVVAGEHNIEETEHTEQKRNVIRIIPHHNYNAAINKYNHDIALLELDEPLVLNSYVTPICIADKEYTNIFLKFGSGYVSGWGRVFHKGRSALVLQYLRVPLVDRATCLLSTKFTIYNNMFCAGFHEGGRDSCQGDSGGPHVTEVEGTSFLTGIISWGEECAMKGKYGIYTKVSRYVNWIKEKTKLTGPEGPSKLTRAETGAGSPGAETAEQKLISEEDLSPATGHHHHHHHH

SEQ ID NO: 96 - protein, 657 aa, Artificial Sequence
  Description of Artificial Sequence: Synthetic pNL177
MQRVNMIMAESPGLITICLLGYLLSAECTVFLDHENANKILNRPKRYNSGKLEEFVQGNLERECMEEKCSFEEAREVFENTERTTEFWKQYVDGDQCESNPCLNGGSCKDDINSYECWCPFGFEGKNCELDVTCNIKNGRCEQFCKNSADNKVVCSCTEGYRLAENQKSCEPAVPFPCGRVSVSQTSKLTRAETVFPDVDYVNSTEAETILDGAPSPAGSPTSTEEGTSESATPESGPGSEPATSGSETPGTSESATPESGPGTSTEPSEGSAPGTSTEPSEGSAPGTSTEPSEGSAPGTSTEPSEGSAPGTSTEPSEGSAPGTSTEPSEGSAPGSPAGSPTSTEEGTSTEPSEGSAPGASSNITQSTQSFNDFTRVVGGEDAKPGQFPWQVVLNGKVDAFCGGSIVNEKWIVTAAHCVETGVKITVVAGEHNIEETEHTEQKRNVIRIIPHHNYNAAINKYNHDIALLELDEPLVLNSYVTPICIADKEYTNIFLKFGSGYVSGWGRVFHKGRSALVLQYLRVPLVDRATCLLSTKFTIYNNMFCAGFHEGGRDSCQGDSGGPHVTEVEGTSFLTGIISWGEECAMKGKYGIYTKVSRYVNWIKEKTKLTGPEGPSKLTRAETGAGSPGAETAEQKLISEEDLSPATGHHHHHHHH

SEQ ID NO: 97 - protein, 801 aa, Artificial Sequence
  Description of Artificial Sequence: Synthetic pNL178
MQRVNMIMAESPGLITICLLGYLLSAECTVFLDHENANKILNRPKRYNSGKLEEFVQGNLERECMEEKCSFEEAREVFENTERTTEFWKQYVDGDQCESNPCLNGGSCKDDINSYECWCPFGFEGKNCELDVTCNIKNGRCEQFCKNSADNKVVCSCTEGYRLAENQKSCEPAVPFPCGRVSVSQTSKLTRAETVFPDVDYVNSTEAETILDGAPGTSESATPESGPGSEPATSGSETPGTSESATPESGPGSEPATSGSETPGTSESATPESGPGTSTEPSEGSAPGSPAGSPTSTEEGTSESATPESGPGSEPATSGSETPGTSESATPESGPGSPAGSPTSTEEGSPAGSPTSTEEGTSTEPSEGSAPGTSESATPESGPGTSESATPESGPGTSESATPESGPGSEPATSGSETPGSEPATSGSETPGSPAGSPTSTEEGTSTEPSEGSAPGTSTEPSEGSAPGSEPATSGSETPGTSESATPESGPGTSTEPSEGSAPASSNITQSTQSFNDFTRVVGGEDAKPGQFPWQVVLNGKVDAFCGGSIVNEKWIVTAAHCVETGVKITVVAGEHNIEETEHTEQKRNVIRIIPHHNYNAAINKYNHDIALLELDEPLVLNSYVTPICIADKEYTNIFLKFGSGYVSGWGRVFHKGRSALVLQYLRVPLVDRATCLLSTKFTIYNNMFCAGFHEGGRDSCQGDSGGPHVTEVEGTSFLTGIISWGEECAMKGKYGIYTKVSRYVNWIKEKTKLTGPEGPSKLTRAETGAGSPGAETAEQKLISEEDLSPATGHHHHHHHH

SEQ ID NO: 98 - protein, 585 aa, Artificial Sequence
  Description of Artificial Sequence: Synthetic pNL179
MQRVNMIMAESPGLITICLLGYLLSAECTVFLDHENANKILNRPKRYNSGKLEEFVQGNLERECMEEKCSFEEAREVFENTERTTEFWKQYVDGDQCESNPCLNGGSCKDDINSYECWCPFGFEGKNCELDVTCNIKNGRCEQFCKNSADNKVVCSCTEGYRLAENQKSCEPAVPFPCGRVSVSQTSKLTRAETVFPDVDYVNSTEAETILDNITQSTQSGAPSPAGSPTSTEEGTSESATPESGPGSEPATSGSETPGTSESATPESGPGTSTEPSEGSAPGTSTEPSEGSAPGASSFNDFTRVVGGEDAKPGQFPWQVVLNGKVDAFCGGSIVNEKWIVTAAHCVETGVKITVVAGEHNIEETEHTEQKRNVIRIIPHHNYNAAINKYNHDIALLELDEPLVLNSYVTPICIADKEYTNIFLKFGSGYVSGWGRVFHKGRSALVLQYLRVPLVDRATCLLSTKFTIYNNMFCAGFHEGGRDSCQGDSGGPHVTEVEGTSFLTGIISWGEECAMKGKYGIYTKVSRYVNWIKEKTKLTGPEGPSKLTRAETGAGSPGAETAEQKLISEEDLSPATGHHHHHHHH

SEQ ID NO: 99 - protein, 657 aa, Artificial Sequence
  Description of Artificial Sequence: Synthetic pNL180
MQRVNMIMAESPGLITICLLGYLLSAECTVFLDHENANKILNRPKRYNSGKLEEFVQGNLERECMEEKCSFEEAREVFENTERTTEFWKQYVDGDQCESNPCLNGGSCKDDINSYECWCPFGFEGKNCELDVTCNIKNGRCEQFCKNSADNKVVCSCTEGYRLAENQKSCEPAVPFPCGRVSVSQTSKLTRAETVFPDVDYVNSTEAETILDNITQSTQSGAPSPAGSPTSTEEGTSESATPESGPGSEPATSGSETPGTSESATPESGPGTSTEPSEGSAPGTSTEPSEGSAPGTSTEPSEGSAPGTSTEPSEGSAPGTSTEPSEGSAPGTSTEPSEGSAPGSPAGSPTSTEEGTSTEPSEGSAPGASSFNDFTRVVGGEDAKPGQFPWQVVLNGKVDAFCGGSIVNEKWIVTAAHCVETGVKITVVAGEHNIEETEHTEQKRNVIRIIPHHNYNAAINKYNHDIALLELDEPLVLNSYVTPICIADKEYTNIFLKFGSGYVSGWGRVFHKGRSALVLQYLRVPLVDRATCLLSTKFTIYNNMFCAGFHEGGRDSCQGDSGGPHVTEVEGTSFLTGIISWGEECAMKGKYGIYTKVSRYVNWIKEKTKLTGPEGPSKLTRAETGAGSPGAETAEQKLISEEDLSPATGHHHHHHHH

SEQ ID NO: 100 - protein, 801 aa, Artificial Sequence
  Description of Artificial Sequence: Synthetic pNL181
MQRVNMIMAESPGLITICLLGYLLSAECTVFLDHENANKILNRPKRYNSGKLEEFVQGNLERECMEEKCSFEEAREVFENTERTTEFWKQYVDGDQCESNPCLNGGSCKDDINSYECWCPFGFEGKNCELDVTCNIKNGRCEQFCKNSADNKVVCSCTEGYRLAENQKSCEPAVPFPCGRVSVSQTSKLTRAETVFPDVDYVNSTEAETILDNITQSTQSGAPGTSESATPESGPGSEPATSGSETPGTSESATPESGPGSEPATSGSETPGTSESATPESGPGTSTEPSEGSAPGSPAGSPTSTEEGTSESATPESGPGSEPATSGSETPGTSESATPESGPGSPAGSPTSTEEGSPAGSPTSTEEGTSTEPSEGSAPGTSESATPESGPGTSESATPESGPGTSESATPESGPGSEPATSGSETPGSEPATSGSETPGSPAGSPTSTEEGTSTEPSEGSAPGTSTEPSEGSAPGSEPATSGSETPGTSESATPESGPGTSTEPSEGSAPASSFNDFTRVVGGEDAKPGQFPWQVVLNGKVDAFCGGSIVNEKWIVTAAHCVETGVKITVVAGEHNIEETEHTEQKRNVIRIIPHHNYNAAINKYNHDIALLELDEPLVLNSYVTPICIADKEYTNIFLKFGSGYVSGWGRVFHKGRSALVLQYLRVPLVDRATCLLSTKFTIYNNMFCAGFHEGGRDSCQGDSGGPHVTEVEGTSFLTGIISWGEECAMKGKYGIYTKVSRYVNWIKEKTKLTGPEGPSKLTRAETGAGSPGAETAEQKLISEEDLSPATGHHHHHHHH

SEQ ID NO: 101 - protein, 585 aa, Artificial Sequence
  Description of Artificial Sequence: Synthetic pNL182
MQRVNMIMAESPGLITICLLGYLLSAECTVFLDHENANKILNRPKRYNSGKLEEFVQGNLERECMEEKCSFEEAREVFENTERTTEFWKQYVDGDQCESNPCLNGGSCKDDINSYECWCPFGFEGKNCELDVTCNIKNGRCEQFCKNSADNKVVCSCTEGYRLAENQKSCEPAVPFPCGRVSVSQTSKLTRAETVFPDVDYVNSTEAETILDNITQSTQSFNDFTRVVGGEDAKPGQFPWQVVLNGKVDAFCGGSIVNEKWIVTAAHCVEGAPSPAGSPTSTEEGTSESATPESGPGSEPATSGSETPGTSESATPESGPGTSTEPSEGSAPGTSTEPSEGSAPGASSTGVKITVVAGEHNIEETEHTEQKRNVIRIIPHHNYNAAINKYNHDIALLELDEPLVLNSYVTPICIADKEYTNIFLKFGSGYVSGWGRVFHKGRSALVLQYLRVPLVDRATCLLSTKFTIYNNMFCAGFHEGGRDSCQGDSGGPHVTEVEGTSFLTGIISWGEECAMKGKYGIYTKVSRYVNWIKEKTKLTGPEGPSKLTRAETGAGSPGAETAEQKLISEEDLSPATGHHHHHHHH

SEQ ID NO: 102 - protein, 657 aa, Artificial Sequence
  Description of Artificial Sequence: Synthetic pNL183
MQRVNMIMAESPGLITICLLGYLLSAECTVFLDHENANKILNRPKRYNSGKLEEFVQGNLERECMEEKCSFEEAREVFENTERTTEFWKQYVDGDQCESNPCLNGGSCKDDINSYECWCPFGFEGKNCELDVTCNIKNGRCEQFCKNSADNKVVCSCTEGYRLAENQKSCEPAVPFPCGRVSVSQTSKLTRAETVFPDVDYVNSTEAETILDNITQSTQSFNDFTRVVGGEDAKPGQFPWQVVLNGKVDAFCGGSIVNEKWIVTAAHCVEGAPSPAGSPTSTEEGTSESATPESGPGSEPATSGSETPGTSESATPESGPGTSTEPSEGSAPGTSTEPSEGSAPGTSTEPSEGSAPGTSTEPSEGSAPGTSTEPSEGSAPGTSTEPSEGSAPGSPAGSPTSTEEGTSTEPSEGSAPGASSTGVKITVVAGEHNIEETEHTEQKRNVIRIIPHHNYNAAINKYNHDIALLELDEPLVLNSYVTPICIADKEYTNIFLKFGSGYVSGWGRVFHKGRSALVLQYLRVPLVDRATCLLSTKFTIYNNMFCAGFHEGGRDSCQGDSGGPHVTEVEGTSFLTGIISWGEECAMKGKYGIYTKVSRYVNWIKEKTKLTGPEGPSKLTRAETGAGSPGAETAEQKLISEEDLSPATGHHHHHHHH

SEQ ID NO: 103 - protein, 801 aa, Artificial Sequence
  Description of Artificial Sequence: Synthetic pNL184
MQRVNMIMAESPGLITICLLGYLLSAECTVFLDHENANKILNRPKRYNSGKLEEFVQGNLERECMEEKCSFEEAREVFENTERTTEFWKQYVDGDQCESNPCLNGGSCKDDINSYECWCPFGFEGKNCELDVTCNIKNGRCEQFCKNSADNKVVCSCTEGYRLAENQKSCEPAVPFPCGRVSVSQTSKLTRAETVFPDVDYVNSTEAETILDNITQSTQSFNDFTRVVGGEDAKPGQFPWQVVLNGKVDAFCGGSIVNEKWIVTAAHCVEGAPGTSESATPESGPGSEPATSGSETPGTSESATPESGPGSEPATSGSETPGTSESATPESGPGTSTEPSEGSAPGSPAGSPTSTEEGTSESATPESGPGSEPATSGSETPGTSESATPESGPGSPAGSPTSTEEGSPAGSPTSTEEGTSTEPSEGSAPGTSESATPESGPGTSESATPESGPGTSESATPESGPGSEPATSGSETPGSEPATSGSETPGSPAGSPTSTEEGTSTEPSEGSAPGTSTEPSEGSAPGSEPATSGSETPGTSESATPESGPGTSTEPSEGSAPASSTGVKITVVAGEHNIEETEHTEQKRNVIRIIPHHNYNAAINKYNHDIALLELDEPLVLNSYVTPICIADKEYTNIFLKFGSGYVSGWGRVFHKGRSALVLQYLRVPLVDRATCLLSTKFTIYNNMFCAGFHEGGRDSCQGDSGGPHVTEVEGTSFLTGIISWGEECAMKGKYGIYTKVSRYVNWIKEKTKLTGPEGPSKLTRAETGAGSPGAETAEQKLISEEDLSPATGHHHHHHHH

SEQ ID NO: 104 - protein, 585 aa, Artificial Sequence
  Description of Artificial Sequence: Synthetic pNL185
MQRVNMIMAESPGLITICLLGYLLSAECTVFLDHENANKILNRPKRYNSGKLEEFVQGNLERECMEEKCSFEEAREVFENTERTTEFWKQYVDGDQCESNPCLNGGSCKDDINSYECWCPFGFEGKNCELDVTCNIKNGRCEQFCKNSADNKVVCSCTEGYRLAENQKSCEPAVPFPCGRVSVSQTSKLTRAETVFPDVDYVNSTEAETILDNITQSTQSFNDFTRVVGGEDAKPGQFPWQVVLNGKVDAFCGGSIVNEKWIVTAAHCVETGVKITVVAGEHNIEETEHTEQKRNVIRIIPHHNYNAAINKYNHDIALLELDEPLVLNSYVTPICIADKEYTNIFLKFGSGYVSGWGRVFHKGRSALVLQYLRVPLVDRATCLLSTKFTIYNNMFCAGFHEGGRDSCQGDSGGPHVTEVEGTSFLTGIISWGEECAMKGKYGIYTKVSRYVNWIKEKTKGAPSPAGSPTSTEEGTSESATPESGPGSEPATSGSETPGTSESATPESGPGTSTEPSEGSAPGTSTEPSEGSAPGASSLTGPEGPSKLTRAETGAGSPGAETAEQKLISEEDLSPATGHHHHHHHH

SEQ ID NO: 105 - protein, 657 aa, Artificial Sequence
  Description of Artificial Sequence: Synthetic pNL186
MQRVNMIMAESPGLITICLLGYLLSAECTVFLDHENANKILNRPKRYNSGKLEEFVQGNLERECMEEKCSFEEAREVFENTERTTEFWKQYVDGDQCESNPCLNGGSCKDDINSYECWCPFGFEGKNCELDVTCNIKNGRCEQFCKNSADNKVVCSCTEGYRLAENQKSCEPAVPFPCGRVSVSQTSKLTRAETVFPDVDYVNSTEAETILDNITQSTQSFNDFTRVVGGEDAKPGQFPWQVVLNGKVDAFCGGSIVNEKWIVTAAHCVETGVKITVVAGEHNIEETEHTEQKRNVIRIIPHHNYNAAINKYNHDIALLELDEPLVLNSYVTPICIADKEYTNIFLKFGSGYVSGWGRVFHKGRSALVLQYLRVPLVDRATCLLSTKFTIYNNMFCAGFHEGGRDSCQGDSGGPHVTEVEGTSFLTGIISWGEECAMKGKYGIYTKVSRYVNWIKEKTKGAPSPAGSPTSTEEGTSESATPESGPGSEPATSGSETPGTSESATPESGPGTSTEPSEGSAPGTSTEPSEGSAPGTSTEPSEGSAPGTSTEPSEGSAPGTSTEPSEGSAPGTSTEPSEGSAPGSPAGSPTSTEEGTSTEPSEGSAPGASSLTGPEGPSKLTRAETGAGSPGAETAEQKLISEEDLSPATGHHHHHHHH

SEQ ID NO: 106 - protein, 801 aa, Artificial Sequence
  Description of Artificial Sequence: Synthetic pNL187
MQRVNMIMAESPGLITICLLGYLLSAECTVFLDHENANKILNRPKRYNSGKLEEFVQGNLERECMEEKCSFEEAREVFENTERTTEFWKQYVDGDQCESNPCLNGGSCKDDINSYECWCPFGFEGKNCELDVTCNIKNGRCEQFCKNSADNKVVCSCTEGYRLAENQKSCEPAVPFPCGRVSVSQTSKLTRAETVFPDVDYVNSTEAETILDNITQSTQSFNDFTRVVGGEDAKPGQFPWQVVLNGKVDAFCGGSIVNEKWIVTAAHCVETGVKITVVAGEHNIEETEHTEQKRNVIRIIPHHNYNAAINKYNHDIALLELDEPLVLNSYVTPICIADKEYTNIFLKFGSGYVSGWGRVFHKGRSALVLQYLRVPLVDRATCLLSTKFTIYNNMFCAGFHEGGRDSCQGDSGGPHVTEVEGTSFLTGIISWGEECAMKGKYGIYTKVSRYVNWIKEKTKGAPGTSESATPESGPGSEPATSGSETPGTSESATPESGPGSEPATSGSETPGTSESATPESGPGTSTEPSEGSAPGSPAGSPTSTEEGTSESATPESGPGSEPATSGSETPGTSESATPESGPGSPAGSPTSTEEGSPAGSPTSTEEGTSTEPSEGSAPGTSESATPESGPGTSESATPESGPGTSESATPESGPGSEPATSGSETPGSEPATSGSETPGSPAGSPTSTEEGTSTEPSEGSAPGTSTEPSEGSAPGSEPATSGSETPGTSESATPESGPGTSTEPSEGSAPASSLTGPEGPSKLTRAETGAGSPGAETAEQKLISEEDLSPATGHHHHHHHH

SEQ ID NO: 107 - protein, 585 aa, Artificial Sequence
  Description of Artificial Sequence: Synthetic pNL188
MQRVNMIMAESPGLITICLLGYLLSAECTVFLDHENANKILNRPKRYNSGKLEEFVQGNLERECMEEKCSFEEAREVFENTERTTEFWKQYVDGDQCESNPCLNGGSCKDDINSYECWCPFGFEGKNCELDVTCNIKNGRCEQFCKNSAGAPSPAGSPTSTEEGTSESATPESGPGSEPATSGSETPGTSESATPESGPGTSTEPSEGSAPGTSTEPSEGSAPGASSDNKVVCSCTEGYRLAENQKSCEPAVPFPCGRVSVSQTSKLTRAETVFPDVDYVNSTEAETILDNITQSTQSFNDFTRVVGGEDAKPGQFPWQVVLNGKVDAFCGGSIVNEKWIVTAAHCVETGVKITVVAGEHNIEETEHTEQKRNVIRIIPHHNYNAAINKYNHDIALLELDEPLVLNSYVTPICIADKEYTNIFLKFGSGYVSGWGRVFHKGRSALVLQYLRVPLVDRATCLLSTKFTIYNNMFCAGFHEGGRDSCQGDSGGPHVTEVEGTSFLTGIISWGEECAMKGKYGIYTKVSRYVNWIKEKTKLTGPEGPSKLTRAETGAGSPGAETAEQKLISEEDLSPATGHHHHHHHH

SEQ ID NO: 108 - protein, 657 aa, Artificial Sequence
  Description of Artificial Sequence: Synthetic pNL189
MQRVNMIMAESPGLITICLLGYLLSAECTVFLDHENANKILNRPKRYNSGKLEEFVQGNLERECMEEKCSFEEAREVFENTERTTEFWKQYVDGDQCESNPCLNGGSCKDDINSYECWCPFGFEGKNCELDVTCNIKNGRCEQFCKNSAGAPSPAGSPTSTEEGTSESATPESGPGSEPATSGSETPGTSESATPESGPGTSTEPSEGSAPGTSTEPSEGSAPGTSTEPSEGSAPGTSTEPSEGSAPGTSTEPSEGSAPGTSTEPSEGSAPGSPAGSPTSTEEGTSTEPSEGSAPGASSDNKVVCSCTEGYRLAENQKSCEPAVPFPCGRVSVSQTSKLTRAETVFPDVDYVNSTEAETILDNITQSTQSFNDFTRVVGGEDAKPGQFPWQVVLNGKVDAFCGGSIVNEKWIVTAAHCVETGVKITVVAGEHNIEETEHTEQKRNVIRIIPHHNYNAAINKYNHDIALLELDEPLVLNSYVTPICIADKEYTNIFLKFGSGYVSGWGRVFHKGRSALVLQYLRVPLVDRATCLLSTKFTIYNNMFCAGFHEGGRDSCQGDSGGPHVTEVEGTSFLTGIISWGEECAMKGKYGIYTKVSRYVNWIKEKTKLTGPEGPSKLTRAETGAGSPGAETAEQKLISEEDLSPATGHHHHHHHH

SEQ ID NO: 109 - protein, 801 aa, Artificial Sequence
  Description of Artificial Sequence: Synthetic pNL190
MQRVNMIMAESPGLITICLLGYLLSAECTVFLDHENANKILNRPKRYNSGKLEEFVQGNLERECMEEKCSFEEAREVFENTERTTEFWKQYVDGDQCESNPCLNGGSCKDDINSYECWCPFGFEGKNCELDVTCNIKNGRCEQFCKNSAGAPGTSESATPESGPGSEPATSGSETPGTSESATPESGPGSEPATSGSETPGTSESATPESGPGTSTEPSEGSAPGSPAGSPTSTEEGTSESATPESGPGSEPATSGSETPGTSESATPESGPGSPAGSPTSTEEGSPAGSPTSTEEGTSTEPSEGSAPGTSESATPESGPGTSESATPESGPGTSESATPESGPGSEPATSGSETPGSEPATSGSETPGSPAGSPTSTEEGTSTEPSEGSAPGTSTEPSEGSAPGSEPATSGSETPGTSESATPESGPGTSTEPSEGSAPASSDNKVVCSCTEGYRLAENQKSCEPAVPFPCGRVSVSQTSKLTRAETVFPDVDYVNSTEAETILDNITQSTQSFNDFTRVVGGEDAKPGQFPWQVVLNGKVDAFCGGSIVNEKWIVTAAHCVETGVKITVVAGEHNIEETEHTEQKRNVIRIIPHHNYNAAINKYNHDIALLELDEPLVLNSYVTPICIADKEYTNIFLKFGSGYVSGWGRVFHKGRSALVLQYLRVPLVDRATCLLSTKFTIYNNMFCAGFHEGGRDSCQGDSGGPHVTEVEGTSFLTGIISWGEECAMKGKYGIYTKVSRYVNWIKEKTKLTGPEGPSKLTRAETGAGSPGAETAEQKLISEEDLSPATGHHHHHHHH

SEQ ID NO: 110 - protein, 549 aa, Artificial Sequence
  Description of Artificial Sequence: Synthetic pNL195
MQRVNMIMAESPGLITICLLGYLLSAECTVFLDHENANKILNRPKRYNSGKLEEFVQGNLERECMEEKCSFEEAREVFENTERTTEFWKQYVDGDQCESNPCLNGGSCKDDINSYECWCPFGFEGKNCELDVTCNIKNGRCEQFCKNSADNKVVCSCTEGYRLAENQKSCEPAVPFPCGRVSVSQTSKLTRAETVFPDVDYVNSTEAETILDNITQSTQSFNDFTRVVGGEDAKPGQFPWQVVLNGKVDAFCGGSIVNEKWIVTAAHCVETGGAPGSPAGSPTSTEEGTSESATPESGPGSEPATSGSETPASSVKITVVAGEHNIEETEHTEQKRNVIRIIPHHNYNAAINKYNHDIALLELDEPLVLNSYVTPICIADKEYTNIFLKFGSGYVSGWGRVFHKGRSALVLQYLRVPLVDRATCLLSTKFTIYNNMFCAGFHEGGRDSCQGDSGGPHVTEVEGTSFLTGIISWGEECAMKGKYGIYTKVSRYVNWIKEKTKLTGPEGPSKLTRAETGAGSPGAETAEQKLISEEDLSPATGHHHHHHHH

SEQ ID NO: 111 - protein, 549 aa, Artificial Sequence
  Description of Artificial Sequence: Synthetic pNL196
MQRVNMIMAESPGLITICLLGYLLSAECTVFLDHENANKILNRPKRYNSGKLEEFVQGNLERECMEEKCSFEEAREVFENTERTTEFWKQYVDGDQCESNPCLNGGSCKDDINSYECWCPFGFEGKNCELDVTCNIKNGRCEQFCKNSADNKVVCSCTEGYRLAENQKSCEPAVPFPCGRVSVSQTSKLTRAETVFPDVDYVNSTEAETILDNITQSTQSFNDFTRVVGGEDAKPGQFPWQVVLNGKVDAFCGGSIVNEKWIVTAAHCVETGVKGAPGSPAGSPTSTEEGTSESATPESGPGSEPATSGSETPASSITVVAGEHNIEETEHTEQKRNVIRIIPHHNYNAAINKYNHDIALLELDEPLVLNSYVTPICIADKEYTNIFLKFGSGYVSGWGRVFHKGRSALVLQYLRVPLVDRATCLLSTKFTIYNNMFCAGFHEGGRDSCQGDSGGPHVTEVEGTSFLTGIISWGEECAMKGKYGIYTKVSRYVNWIKEKTKLTGPEGPSKLTRAETGAGSPGAETAEQKLISEEDLSPATGHHHHHHHH

SEQ ID NO: 112 - protein, 549 aa, Artificial Sequence
  Description of Artificial Sequence: Synthetic pNL197
MQRVNMIMAESPGLITICLLGYLLSAECTVFLDHENANKILNRPKRYNSGKLEEFVQGNLERECMEEKCSFEEAREVFENTERTTEFWKQYVDGDQCESNPCLNGGSCKDDINSYECWCPFGFEGKNCELDVTCNIKNGRCEQFCKNSADNKVVCSCTEGYRLAENQKSCEPAVPFPCGRVSVSQTSKLTRAETVFPDVDYVNSTEAETILDNITQSTQSFNDFTRVVGGEDAKPGQFPWQVVLNGKVDAFCGGSIVNEKWIVTAAHCVETGVKITGAPGSPAGSPTSTEEGTSESATPESGPGSEPATSGSETPASSVVAGEHNIEETEHTEQKRNVIRIIPHHNYNAAINKYNHDIALLELDEPLVLNSYVTPICIADKEYTNIFLKFGSGYVSGWGRVFHKGRSALVLQYLRVPLVDRATCLLSTKFTIYNNMFCAGFHEGGRDSCQGDSGGPHVTEVEGTSFLTGIISWGEECAMKGKYGIYTKVSRYVNWIKEKTKLTGPEGPSKLTRAETGAGSPGAETAEQKLISEEDLSPATGHHHHHHHH

SEQ ID NO: 113 - protein, 549 aa, Artificial Sequence
  Description of Artificial Sequence: Synthetic pNL198
MQRVNMIMAESPGLITICLLGYLLSAECTVFLDHENANKILNRPKRYNSGKLEEFVQGNLERECMEEKCSFEEAREVFENTERTTEFWKQYVDGDQCESNPCLNGGSCKDDINSYECWCPFGFEGKNCELDVTCNIKNGRCEQFCKNSADNGAPGSPAGSPTSTEEGTSESATPESGPGSEPATSGSETPASSKVVCSCTEGYRLAENQKSCEPAVPFPCGRVSVSQTSKLTRAETVFPDVDYVNSTEAETILDNITQSTQSFNDFTRVVGGEDAKPGQFPWQVVLNGKVDAFCGGSIVNEKWIVTAAHCVETGVKITVVAGEHNIEETEHTEQKRNVIRIIPHHNYNAAINKYNHDIALLELDEPLVLNSYVTPICIADKEYTNIFLKFGSGYVSGWGRVFHKGRSALVLQYLRVPLVDRATCLLSTKFTIYNNMFCAGFHEGGRDSCQGDSGGPHVTEVEGTSFLTGIISWGEECAMKGKYGIYTKVSRYVNWIKEKTKLTGPEGPSKLTRAETGAGSPGAETAEQKLISEEDLSPATGHHHHHHHH

SEQ ID NO: 114 - protein, 549 aa, Artificial Sequence
  Description of Artificial Sequence: Synthetic pNL199
MQRVNMIMAESPGLITICLLGYLLSAECTVFLDHENANKILNRPKRYNSGKLEEFVQGNLERECMEEKCSFEEAREVFENTERTTEFWKQYVDGDQCESNPCLNGGSCKDDINSYECWCPFGFEGKNCELDVTCNIKNGRCEQFCKNSADNKVVCSCTEGYRLAENQKSCEPAVPFPCGRVSVSQTSKLTRAETVFPDVDYVNSTEAETILDNITQSTQSFNDFTRVVGGEDAKPGQFPWQVVLNGKVDAFCGGSIVNEKWIVTAAHCVETGVKITVVAGEHNIEETEHTEQKRNVIRIIPHHNYNAAINKYNHDIALLELDEPLVLNSGAPGSPAGSPTSTEEGTSESATPESGPGSEPATSGSETPASSYVTPICIADKEYTNIFLKFGSGYVSGWGRVFHKGRSALVLQYLRVPLVDRATCLLSTKFTIYNNMFCAGFHEGGRDSCQGDSGGPHVTEVEGTSFLTGIISWGEECAMKGKYGIYTKVSRYVNWIKEKTKLTGPEGPSKLTRAETGAGSPGAETAEQKLISEEDLSPATGHHHHHHHH

SEQ ID NO: 115 - protein, 611 aa, Artificial Sequence
  Description of Artificial Sequence: Synthetic pNL202
MQRVNMIMAESPGLITICLLGYLLSAECTVFLDHENANKILNRPKRYNSGKLEEFVQGNLERECMEEKCSFEEAREVFENTERTTEFWKQYVDGDQCESNPCLNGGSCKDDINSYECWCPFGFEGKNCELDVTCNIKNGRCEQFCKNSADNKVVCSCTEGYRLAENQKSCEPAVPFPCGRVSVSQTSKLTRAETVFPDVDYVNSTEAETILDNITQSTQSFNDFTRVVGGEDAKPGQFPWQVVLNGKVDAFCGGSIVNEKWIVTAAHCVETGVKITVVAGEHNIEETEHTEQKRNVIRIIPHHNYNAAINKYNHDIALLELDEPLVLNSYVTPICIADKEYTNIFLKFGSGYVSGWGRVFHKGRSALVLQYLRVPLVDRATCLLSTKFTIYNNMFCAGFHEGGRDSCQGDSGGPHVTEVEGTSFLTGIISWGEECAMKGKYGIYTKVSRYVNWIKEKTKLTGAGSPGAETALVPRSFLLRNPNDKYEPFWEDEESGAGSPGAETAGAPSPAGSPTSTEEGTSESATPESGPGSEPATSGSETPGTSESATPESGPGTSTEPSEGSAPGTSTEPSEGSAPGASSGAETAEQKLISEEDLSPATGHHHHHHHH

SEQ ID NO: 116 - protein, 1345 aa, Artificial Sequence
  Description of Artificial Sequence: Synthetic FIX-092
MQRVNMIMAESPGLITICLLGYLLSAECTVFLDHENANKILNRPKRYNSGKLEEFVQGNLERECMEEKCSFEEAREVFENTERTTEFWKQYVDGDQCESNPCLNGGSCKDDINSYECWCPFGFEGKNCELDVTCNIKNGRCEQFCKNSADNKVVCSCTEGYRLAENQKSCEPAVPFPCGRVSVSQTSKLTRAETVFPDVDYVNSTEAETILDNITQSTQSFNDFTRVVGGEDAKPGQFPWQVVLNGKVDAFCGGSIVNEKWIVTAAHCVETGVKITVVAGEHNIEETEHTEQKRNVIRIIPHHNYNAAINKYNHDIALLELDEPLVLNSYVTPICIADKEYTNIFLKFGSGYVSGWGRVFHKGRSALVLQYLRVPLVDRATCLRSTKFTIYNNMFCAGFHEGGRDSCQGDSGGPHVTEVEGTSFLTGIISWGEECAMKGKYGIYTKVSRYVNWIKEKTKLTGPEGPSKLTRAETGSPGSPAGSPTSTEEGTSESATPESGPGTSTEPSEGSAPGSPAGSPTSTEEGTSTEPSEGSAPGTSTEPSEGSAPGTSESATPESGPGSEPATSGSETPGSEPATSGSETPGSPAGSPTSTEEGTSESATPESGPGTSTEPSEGSAPGTSTEPSEGSAPGSPAGSPTSTEEGTSTEPSEGSAPGTSTEPSEGSAPGTSESATPESGPGTSTEPSEGSAPGTSESATPESGPGSEPATSGSETPGTSTEPSEGSAPGTSTEPSEGSAPGTSESATPESGPGTSESATPESGPGSPAGSPTSTEEGTSESATPESGPGSEPATSGSETPGTSESATPESGPGTSTEPSEGSAPGTSTEPSEGSAPGTSTEPSEGSAPGTSTEPSEGSAPGTSTEPSEGSAPGTSTEPSEGSAPGSPAGSPTSTEEGTSTEPSEGSAPGTSESATPESGPGSEPATSGSETPGTSESATPESGPGSEPATSGSETPGTSESATPESGPGTSTEPSEGSAPGTSESATPESGPGSPAGSPTSTEEGSPAGSPTSTEEGSPAGSPTSTEEGTSESATPESGPGTSTEPSEGSAPGTSESATPESGPGSEPATSGSETPGTSESATPESGPGSEPATSGSETPGTSESATPESGPGTSTEPSEGSAPGSPAGSPTSTEEGTSESATPESGPGSEPATSGSETPGTSESATPESGPGSPAGSPTSTEEGSPAGSPTSTEEGTSTEPSEGSAPGTSESATPESGPGTSESATPESGPGTSESATPESGPGSEPATSGSETPGSEPATSGSETPGSPAGSPTSTEEGTSTEPSEGSAPGTSTEPSEGSAPGSEPATSGSETPGTSESATPESGPGTSTEPSEGSAPGSSS

SEQ ID NO: 117 - protein, 655 aa, Artificial Sequence
  Description of Artificial Sequence: Synthetic pJH0131
MQRVNMIMAESPGLITICLLGYLLSAECTVFLDHENANKILNRPKRYNSGKLEEFVQGNLERECMEEKCSFEEAREVFENTERTTEFWKQYVDGDQCESNPCLNGGSCKDDINSYECWCPFGFEGKNCELDVTCNIKNGRCEQFCKNSADNKVVCSCTEGYRLAENQKSCEPAVPFPCGRVSVSQTSKLTRAETVFPDVDYVNSTEAETILDNITQSTQSFNDFTRVVGGEDAKPGQFPWQVVLNGKVDAFCGGSIVNEKWIVTAAHCVETGVKITVVAGEHNIEETEHTEQKRNVIRIIPHHNYNAAINKYNHDIALLELDEPLVLNSYVTPICIADKEYTNIFLKFGSGYVSGWGRVFHKGRSALVLQYLRVPLVDRATCLLSTKFTIYNNMFCAGFHEGGRDSCQGDSGGPHVTEVEGTSFLTGIISWGEECAMKGKYGIYTKVSRYVNWIKEKTKLTGAGSPGAETALVPRSFLLRNPNDKYEPFWEDEESGAGSPGAETAGAPSPAGSPTSTEEGTSESATPESGPGSEPATSGSETPGTSESATPESGPGTSTEPSEGSAPGTSTEPSEGSAPGTSTEPSEGSAPGTSTEPSEGSAPGTSTEPSEGSAPGTSTEPSEGSAPGSPAGSPTSTEEGTSTEPSEGSAPGASS

SEQ ID NO: 118 - protein, 503 aa, Artificial Sequence
  Description of Artificial Sequence: Synthetic pJH44
MQRVNMIMAESPGLITICLLGYLLSAECTVFLDHENANKILNRPKRYNSGKLEEFVQGNLERECMEEKCSFEEAREVFENTERTTEFWKQYVDGDQCESNPCLNGGSCKDDINSYECWCPFGFEGKNCELDVTCNIKNGRCEQFCKNSADNGAPGSPAGSPTSTEEGTSESATPESGPGSEPATSGSETPASSKVVCSCTEGYRLAENQKSCEPAVPFPCGRVSVSQTSKLTRAETVFPDVDYVNSTEAETILDNITQSTQSFNDFTRVVGGEDAKPGQFPWQVVLNGKVDAFCGGSIVNEKWIVTAAHCVETGVKITVVAGEHNIEETEHTEQKRNVIRIIPHHNYNAAINKYNHDIALLELDEPLVLNSYVTPICIADKEYTNIFLKFGSGYVSGWGRVFHKGRSALVLQYLRVPLVDRATCLLSTKFTIYNNMFCAGFHEGGRDSCQGDSGGPHVTEVEGTSFLTGIISWGEECAMKGKYGIYTKVSRYVNWIKEKTKLT

SEQ ID NO: 119 - protein, 539 aa, Artificial Sequence
  Description of Artificial Sequence: Synthetic pJH46
MQRVNMIMAESPGLITICLLGYLLSAECTVFLDHENANKILNRPKRYNSGKLEEFVQGNLERECMEEKCSFEEAREVFENTERTTEFWKQYVDGDQCESNPCLNGGSCKDDINSYECWCPFGFEGKNCELDVTCNIKNGRCEQFCKNSADNKVVCSCTEGYRLAENQKSCEPAVPFPCGRVSVSQTSKLTRAETVFPDVDYVNSTEAETILDGAPSPAGSPTSTEEGTSESATPESGPGSEPATSGSETPGTSESATPESGPGTSTEPSEGSAPGTSTEPSEGSAPGASSNITQSTQSFNDFTRVVGGEDAKPGQFPWQVVLNGKVDAFCGGSIVNEKWIVTAAHCVETGVKITVVAGEHNIEETEHTEQKRNVIRIIPHHNYNAAINKYNHDIALLELDEPLVLNSYVTPICIADKEYTNIFLKFGSGYVSGWGRVFHKGRSALVLQYLRVPLVDRATCLLSTKFTIYNNMFCAGFHEGGRDSCQGDSGGPHVTEVEGTSFLTGIISWGEECAMKGKYGIYTKVSRYVNWIKEKTKLT

SEQ ID NO: 120 - protein, 611 aa, Artificial Sequence
  Description of Artificial Sequence: Synthetic pJH47
MQRVNMIMAESPGLITICLLGYLLSAECTVFLDHENANKILNRPKRYNSGKLEEFVQGNLERECMEEKCSFEEAREVFENTERTTEFWKQYVDGDQCESNPCLNGGSCKDDINSYECWCPFGFEGKNCELDVTCNIKNGRCEQFCKNSADNKVVCSCTEGYRLAENQKSCEPAVPFPCGRVSVSQTSKLTRAETVFPDVDYVNSTEAETILDGAPSPAGSPTSTEEGTSESATPESGPGSEPATSGSETPGTSESATPESGPGTSTEPSEGSAPGTSTEPSEGSAPGTSTEPSEGSAPGTSTEPSEGSAPGTSTEPSEGSAPGTSTEPSEGSAPGSPAGSPTSTEEGTSTEPSEGSAPGASSNITQSTQSFNDFTRVVGGEDAKPGQFPWQVVLNGKVDAFCGGSIVNEKWIVTAAHCVETGVKITVVAGEHNIEETEHTEQKRNVIRIIPHHNYNAAINKYNHDIALLELDEPLVLNSYVTPICIADKEYTNIFLKFGSGYVSGWGRVFHKGRSALVLQYLRVPLVDRATCLLSTKFTIYNNMFCAGFHEGGRDSCQGDSGGPHVTEVEGTSFLTGIISWGEECAMKGKYGIYTKVSRYVNWIKEKTKLT

SEQ ID NO: 121 - protein, 655 aa, Artificial Sequence
  Description of Artificial Sequence: Synthetic pJH50
MQRVNMIMAESPGLITICLLGYLLSAECTVFLDHENANKILNRPKRYNSGKLEEFVQGNLERECMEEKCSFEEAREVFENTERTTEFWKQYVDGDQCESNPCLNGGSCKDDINSYECWCPFGFEGKNCELDVTCNIKNGRCEQFCKNSADNKVVCSCTEGYRLAENQKSCEPAVPFPCGRVSVSQTSKLTRAETVFPDVDYVNSTEAETILDNITQSTQSFNDFTRVVGGEDAKPGQFPWQVVLNGKVDAFCGGSIVNEKWIVTAAHCVETGVKITVVAGEHNIEETEHTEQKRNVIRIIPHHNYNAAINKYNHDIALLELDEPLVLNSYVTPICIADKEYTNIFLKFGSGYVSGWGRVFHKGRSALVLQYLRVPLVDRATCLLSTKFTIYNNMFCAGFHEGGRDSCQGDSGGPHVTEVEGTSFLTGIISWGEECAMKGKYGIYTKVSRYVNWIKEKTKLTGAGSPGAETALVPRSFLLRNPNDKYEPFWEDEESGAGSPGAETAGAPTSTEPSEGSAPGTSESATPESGPGTSESATPESGPGTSESATPESGPGSEPATSGSETPGSEPATSGSETPGSPAGSPTSTEEGTSTEPSEGSAPGTSTEPSEGSAPGSEPATSGSETPGTSESATPESGPGTSTEPSEGSAPGASS

SEQ ID NO: 122 - protein, 799 aa, Artificial Sequence
  Description of Artificial Sequence: Synthetic pJH51
MQRVNMIMAESPGLITICLLGYLLSAECTVFLDHENANKILNRPKRYNSGKLEEFVQGNLERECMEEKCSFEEAREVFENTERTTEFWKQYVDGDQCESNPCLNGGSCKDDINSYECWCPFGFEGKNCELDVTCNIKNGRCEQFCKNSADNKVVCSCTEGYRLAENQKSCEPAVPFPCGRVSVSQTSKLTRAETVFPDVDYVNSTEAETILDNITQSTQSFNDFTRVVGGEDAKPGQFPWQVVLNGKVDAFCGGSIVNEKWIVTAAHCVETGVKITVVAGEHNIEETEHTEQKRNVIRIIPHHNYNAAINKYNHDIALLELDEPLVLNSYVTPICIADKEYTNIFLKFGSGYVSGWGRVFHKGRSALVLQYLRVPLVDRATCLLSTKFTIYNNMFCAGFHEGGRDSCQGDSGGPHVTEVEGTSFLTGIISWGEECAMKGKYGIYTKVSRYVNWIKEKTKLTGAGSPGAETALVPRSFLLRNPNDKYEPFWEDEESGAGSPGAETAGAPGTSESATPESGPGSEPATSGSETPGTSESATPESGPGSEPATSGSETPGTSESATPESGPGTSTEPSEGSAPGSPAGSPTSTEEGTSESATPESGPGSEPATSGSETPGTSESATPESGPGSPAGSPTSTEEGSPAGSPTSTEEGTSTEPSEGSAPGTSESATPESGPGTSESATPESGPGTSESATPESGPGSEPATSGSETPGSEPATSGSETPGSPAGSPTSTEEGTSTEPSEGSAPGTSTEPSEGSAPGSEPATSGSETPGTSESATPESGPGTSTEPSEGSAPASS

SEQ ID NO: 123 - protein, 583 aa, Artificial Sequence
  Description of Artificial Sequence: Synthetic pJH52
MQRVNMIMAESPGLITICLLGYLLSAECTVFLDHENANKILNRPKRYNSGKLEEFVQGNLERECMEEKCSFEEAREVFENTERTTEFWKQYVDGDQCESNPCLNGGSCKDDINSYECWCPFGFEGKNCELDVTCNIKNGRCEQFCKNSADNKVVCSCTEGYRLAENQKSCEPAVPFPCGRVSVSQTSKLTRAETVFPDVDYVNSTEAETILDNITQSTQSFNDFTRVVGGEDAKPGQFPWQVVLNGKVDAFCGGSIVNEKWIVTAAHCVETGVKITVVAGEHNIEETEHTEQKRNVIRIIPHHNYNAAINKYNHDIALLELDEPLVLNSYVTPICIADKEYTNIFLKFGSGYVSGWGRVFHKGRSALVLQYLRVPLVDRATCLLSTKFTIYNNMFCAGFHEGGRDSCQGDSGGPHVTEVEGTSFLTGIISWGEECAMKGKYGIYTKVSRYVNWIKEKTKLTGAGSPGAETALVPRSFLLRNPNDKYEPFWEDEESGAGSPGAETAGAPTSESATPESGPGSEPATSGSETPGTSESATPESGPGSEPATSGSETPGTSESATPESGPGTSTEPSEGSAPGASS

SEQ ID NO: 124 - protein, 503 aa, Artificial Sequence
  Description of Artificial Sequence: Synthetic pJH54
MQRVNMIMAESPGLITICLLGYLLSAECTVFLDHENANKILNRPKRYNSGKLEEFVQGNLERECMEEKCSFEEAREVFENTERTTEFWKQYVDGDQCESNPCLNGGSCKDDINSYECWCPFGFEGKNCELDVTCNIKNGRCEQFCKNSADNKVVCSCTEGYRLAENQKSCEPAVPFPCGRVSVSQTSKLTRAETVFPDVDYVNSTEAETILDNITQSTQSFNDFTRVVGGEDAKPGQFPWQVVLNGKVDAFCGGSIVNEKWIVTAAHCVEGAPGSPAGSPTSTEEGTSESATPESGPGSEPATSGSETPASSTGVKITVVAGEHNIEETEHTEQKRNVIRIIPHHNYNAAINKYNHDIALLELDEPLVLNSYVTPICIADKEYTNIFLKFGSGYVSGWGRVFHKGRSALVLQYLRVPLVDRATCLLSTKFTIYNNMFCAGFHEGGRDSCQGDSGGPHVTEVEGTSFLTGIISWGEECAMKGKYGIYTKVSRYVNWIKEKTKLT

SEQ ID NO: 125 - protein, 502 aa, Artificial Sequence
  Description of Artificial Sequence: Synthetic pJH55
MQRVNMIMAESPGLITICLLGYLLSAECTVFLDHENANKILNRPKRYNSGKLEEFVQGNLERECMEEKCSFEEAREVFENTERTTEFWKQYVDGDQCESNPCLNGGSCKDDINSYECWCPFGFEGKNCELDVTCNIKNGRCEQFCKNSADNKVVCSCTEGYRLAENQKSCEPAVPFPCGRVSVSQTSKLTRAETVFPDVDYVNSTEAETILDGAPGSPAGSPTSTEEGTSESATPESGPGSEPATSGSETPASSNITQSTQSFNDFTRVVGGEDAKPGQFPWQVVLNGKVDAFCGGSIVNEKWIVTAAHCVETGVKITVVAGEHNIEETEHTEQKRNVIRIIPHHNYNAAINKYNHDIALLELDEPLVLNSYVTPICIADKEYTNIFLKFGSGYVSGWGRVFHKGRSALVLQYLRVPLVDRATCLLSTKFTIYNNMFCAGFHEGGRDSCQGDSGGPHVTEVEGTSFLTGIISWGEECAMKGKYGIYTKVSRYVNWIKEKTKL

SEQ ID NO: 126 - protein, 624 aa, Artificial Sequence
  Description of Artificial Sequence: Synthetic pJH59
MQRVNMIMAESPGLITICLLGYLLSAECTVFLDHENANKILNRPKRYNSGKLEEFVQGNLERECMEEKCSFEEAREVFENTERTTEFWKQYVDGDQCESNPCLNGGSCKDDINSYECWCPFGFEGKNCELDVTCNIKNGRCEQFCKNSADNKVVCSCTEGYRLAENQKSCEPAVPFPCGRVSVSQTSKLTRAETVFPDVDYVNSTEAETILDGAPGSPAGSPTSTEEGTSESATPESGPGSEPATSGSETPASSNITQSTQSFNDFTRVVGGEDAKPGQFPWQVVLNGKVDAFCGGSIVNEKWIVTAAHCVETGVKITVVAGEHNIEETEHTEQKRNVIRIIPHHNYNAAINKYNHDIALLELDEPLVLNSYVTPICIADKEYTNIFLKFGSGYVSGWGRVFHKGRSALVLQYLRVPLVDRATCLLSTKFTIYNNMFCAGFHEGGRDSCQGDSGGPHVTEVEGTSFLTGIISWGEECAMKGKYGIYTKVSRYVNWIKEKTKLTGAGSPGAETALVPRSFLLRNPNDKYEPFWEDEESGAGSPGAETAGAPTSESATPESGPGSEPATSGSETPGTSESATPESGPGSEPATSGSETPGTSESATPESGPGTSTEPSEGSAPGAS

SEQ ID NO: 127 - protein, 697 aa, Artificial Sequence
  Description of Artificial Sequence: Synthetic pJH60
MQRVNMIMAESPGLITICLLGYLLSAECTVFLDHENANKILNRPKRYNSGKLEEFVQGNLERECMEEKCSFEEAREVFENTERTTEFWKQYVDGDQCESNPCLNGGSCKDDINSYECWCPFGFEGKNCELDVTCNIKNGRCEQFCKNSADNKVVCSCTEGYRLAENQKSCEPAVPFPCGRVSVSQTSKLTRAETVFPDVDYVNSTEAETILDGAPGSPAGSPTSTEEGTSESATPESGPGSEPATSGSETPASSNITQSTQSFNDFTRVVGGEDAKPGQFPWQVVLNGKVDAFCGGSIVNEKWIVTAAHCVETGVKITVVAGEHNIEETEHTEQKRNVIRIIPHHNYNAAINKYNHDIALLELDEPLVLNSYVTPICIADKEYTNIFLKFGSGYVSGWGRVFHKGRSALVLQYLRVPLVDRATCLLSTKFTIYNNMFCAGFHEGGRDSCQGDSGGPHVTEVEGTSFLTGIISWGEECAMKGKYGIYTKVSRYVNWIKEKTKLTGAGSPGAETALVPRSFLLRNPNDKYEPFWEDEESGAGSPGAETAGAPSPAGSPTSTEEGTSESATPESGPGSEPATSGSETPGTSESATPESGPGTSTEPSEGSAPGTSTEPSEGSAPGTSTEPSEGSAPGTSTEPSEGSAPGTSTEPSEGSAPGTSTEPSEGSAPGSPAGSPTSTEEGTSTEPSEGSAPGASS

SEQ ID NO: 128 - protein, 841 aa, Artificial Sequence
  Description of Artificial Sequence: Synthetic pJH61
MQRVNMIMAESPGLITICLLGYLLSAECTVFLDHENANKILNRPKRYNSGKLEEFVQGNLERECMEEKCSFEEAREVFENTERTTEFWKQYVDGDQCESNPCLNGGSCKDDINSYECWCPFGFEGKNCELDVTCNIKNGRCEQFCKNSADNKVVCSCTEGYRLAENQKSCEPAVPFPCGRVSVSQTSKLTRAETVFPDVDYVNSTEAETILDGAPGSPAGSPTSTEEGTSESATPESGPGSEPATSGSETPASSNITQSTQSFNDFTRVVGGEDAKPGQFPWQVVLNGKVDAFCGGSIVNEKWIVTAAHCVETGVKITVVAGEHNIEETEHTEQKRNVIRIIPHHNYNAAINKYNHDIALLELDEPLVLNSYVTPICIADKEYTNIFLKFGSGYVSGWGRVFHKGRSALVLQYLRVPLVDRATCLLSTKFTIYNNMFCAGFHEGGRDSCQGDSGGPHVTEVEGTSFLTGIISWGEECAMKGKYGIYTKVSRYVNWIKEKTKLTGAGSPGAETALVPRSFLLRNPNDKYEPFWEDEESGAGSPGAETAGAPGTSESATPESGPGSEPATSGSETPGTSESATPESGPGSEPATSGSETPGTSESATPESGPGTSTEPSEGSAPGSPAGSPTSTEEGTSESATPESGPGSEPATSGSETPGTSESATPESGPGSPAGSPTSTEEGSPAGSPTSTEEGTSTEPSEGSAPGTSESATPESGPGTSESATPESGPGTSESATPESGPGSEPATSGSETPGSEPATSGSETPGSPAGSPTSTEEGTSTEPSEGSAPGTSTEPSEGSAPGSEPATSGSETPGTSESATPESGPGTSTEPSEGSAPASS

SEQ ID NO: 129 - protein, 661 aa, Artificial Sequence
  Description of Artificial Sequence: Synthetic pJH62
MQRVNMIMAESPGLITICLLGYLLSAECTVFLDHENANKILNRPKRYNSGKLEEFVQGNLERECMEEKCSFEEAREVFENTERTTEFWKQYVDGDQCESNPCLNGGSCKDDINSYECWCPFGFEGKNCELDVTCNIKNGRCEQFCKNSADNKVVCSCTEGYRLAENQKSCEPAVPFPCGRVSVSQTSKLTRAETVFPDVDYVNSTEAETILDGAPSPAGSPTSTEEGTSESATPESGPGSEPATSGSETPGTSESATPESGPGTSTEPSEGSAPGTSTEPSEGSAPGASSNITQSTQSFNDFTRVVGGEDAKPGQFPWQVVLNGKVDAFCGGSIVNEKWIVTAAHCVETGVKITVVAGEHNIEETEHTEQKRNVIRIIPHHNYNAAINKYNHDIALLELDEPLVLNSYVTPICIADKEYTNIFLKFGSGYVSGWGRVFHKGRSALVLQYLRVPLVDRATCLLSTKFTIYNNMFCAGFHEGGRDSCQGDSGGPHVTEVEGTSFLTGIISWGEECAMKGKYGIYTKVSRYVNWIKEKTKLTGAGSPGAETALVPRSFLLRNPNDKYEPFWEDEESGAGSPGAETAGAPTSESATPESGPGSEPATSGSETPGTSESATPESGPGSEPATSGSETPGTSESATPESGPGTSTEPSEGSAPGASS

SEQ ID NO: 130 - protein, 733 aa, Artificial Sequence
  Description of Artificial Sequence: Synthetic pJH63
MQRVNMIMAESPGLITICLLGYLLSAECTVFLDHENANKILNRPKRYNSGKLEEFVQGNLERECMEEKCSFEEAREVFENTERTTEFWKQYVDGDQCESNPCLNGGSCKDDINSYECWCPFGFEGKNCELDVTCNIKNGRCEQFCKNSADNKVVCSCTEGYRLAENQKSCEPAVPFPCGRVSVSQTSKLTRAETVFPDVDYVNSTEAETILDGAPSPAGSPTSTEEGTSESATPESGPGSEPATSGSETPGTSESATPESGPGTSTEPSEGSAPGTSTEPSEGSAPGASSNITQSTQSFNDFTRVVGGEDAKPGQFPWQVVLNGKVDAFCGGSIVNEKWIVTAAHCVETGVKITVVAGEHNIEETEHTEQKRNVIRIIPHHNYNAAINKYNHDIALLELDEPLVLNSYVTPICIADKEYTNIFLKFGSGYVSGWGRVFHKGRSALVLQYLRVPLVDRATCLLSTKFTIYNNMFCAGFHEGGRDSCQGDSGGPHVTEVEGTSFLTGIISWGEECAMKGKYGIYTKVSRYVNWIKEKTKLTGAGSPGAETALVPRSFLLRNPNDKYEPFWEDEESGAGSPGAETAGAPSPAGSPTSTEEGTSESATPESGPGSEPATSGSETPGTSESATPESGPGTSTEPSEGSAPGTSTEPSEGSAPGTSTEPSEGSAPGTSTEPSEGSAPGTSTEPSEGSAPGTSTEPSEGSAPGSPAGSPTSTEEGTSTEPSEGSAPGASS

SEQ ID NO: 131 - protein, 877 aa, Artificial Sequence
  Description of Artificial Sequence: Synthetic pJH64
MQRVNMIMAESPGLITICLLGYLLSAECTVFLDHENANKILNRPKRYNSGKLEEFVQGNLERECMEEKCSFEEAREVFENTERTTEFWKQYVDGDQCESNPCLNGGSCKDDINSYECWCPFGFEGKNCELDVTCNIKNGRCEQFCKNSADNKVVCSCTEGYRLAENQKSCEPAVPFPCGRVSVSQTSKLTRAETVFPDVDYVNSTEAETILDGAPSPAGSPTSTEEGTSESATPESGPGSEPATSGSETPGTSESATPESGPGTSTEPSEGSAPGTSTEPSEGSAPGASSNITQSTQSFNDFTRVVGGEDAKPGQFPWQVVLNGKVDAFCGGSIVNEKWIVTAAHCVETGVKITVVAGEHNIEETEHTEQKRNVIRIIPHHNYNAAINKYNHDIALLELDEPLVLNSYVTPICIADKEYTNIFLKFGSGYVSGWGRVFHKGRSALVLQYLRVPLVDRATCLLSTKFTIYNNMFCAGFHEGGRDSCQGDSGGPHVTEVEGTSFLTGIISWGEECAMKGKYGIYTKVSRYVNWIKEKTKLTGAGSPGAETALVPRSFLLRNPNDKYEPFWEDEESGAGSPGAETAGAPGTSESATPESGPGSEPATSGSETPGTSESATPESGPGSEPATSGSETPGTSESATPESGPGTSTEPSEGSAPGSPAGSPTSTEEGTSESATPESGPGSEPATSGSETPGTSESATPESGPGSPAGSPTSTEEGSPAGSPTSTEEGTSTEPSEGSAPGTSESATPESGPGTSESATPESGPGTSESATPESGPGSEPATSGSETPGSEPATSGSETPGSPAGSPTSTEEGTSTEPSEGSAPGTSTEPSEGSAPGSEPATSGSETPGTSESATPESGPGTSTEPSEGSAPASS

SEQ ID NO: 132 - protein, 733 aa, Artificial Sequence
  Description of Artificial Sequence: Synthetic pJH65
MQRVNMIMAESPGLITICLLGYLLSAECTVFLDHENANKILNRPKRYNSGKLEEFVQGNLERECMEEKCSFEEAREVFENTERTTEFWKQYVDGDQCESNPCLNGGSCKDDINSYECWCPFGFEGKNCELDVTCNIKNGRCEQFCKNSADNKVVCSCTEGYRLAENQKSCEPAVPFPCGRVSVSQTSKLTRAETVFPDVDYVNSTEAETILDGAPSPAGSPTSTEEGTSESATPESGPGSEPATSGSETPGTSESATPESGPGTSTEPSEGSAPGTSTEPSEGSAPGTSTEPSEGSAPGTSTEPSEGSAPGTSTEPSEGSAPGTSTEPSEGSAPGSPAGSPTSTEEGTSTEPSEGSAPGASSNITQSTQSFNDFTRVVGGEDAKPGQFPWQVVLNGKVDAFCGGSIVNEKWIVTAAHCVETGVKITVVAGEHNIEETEHTEQKRNVIRIIPHHNYNAAINKYNHDIALLELDEPLVLNSYVTPICIADKEYTNIFLKFGSGYVSGWGRVFHKGRSALVLQYLRVPLVDRATCLLSTKFTIYNNMFCAGFHEGGRDSCQGDSGGPHVTEVEGTSFLTGIISWGEECAMKGKYGIYTKVSRYVNWIKEKTKLTGAGSPGAETALVPRSFLLRNPNDKYEPFWEDEESGAGSPGAETAGAPTSESATPESGPGSEPATSGSETPGTSESATPESGPGSEPATSGSETPGTSESATPESGPGTSTEPSEGSAPGASS

SEQ ID NO: 133 - protein, 805 aa, Artificial Sequence
  Description of Artificial Sequence: Synthetic pJH66
MQRVNMIMAESPGLITICLLGYLLSAECTVFLDHENANKILNRPKRYNSGKLEEFVQGNLERECMEEKCSFEEAREVFENTERTTEFWKQYVDGDQCESNPCLNGGSCKDDINSYECWCPFGFEGKNCELDVTCNIKNGRCEQFCKNSADNKVVCSCTEGYRLAENQKSCEPAVPFPCGRVSVSQTSKLTRAETVFPDVDYVNSTEAETILDGAPSPAGSPTSTEEGTSESATPESGPGSEPATSGSETPGTSESATPESGPGTSTEPSEGSAPGTSTEPSEGSAPGTSTEPSEGSAPGTSTEPSEGSAPGTSTEPSEGSAPGTSTEPSEGSAPGSPAGSPTSTEEGTSTEPSEGSAPGASSNITQSTQSFNDFTRVVGGEDAKPGQFPWQVVLNGKVDAFCGGSIVNEKWIVTAAHCVETGVKITVVAGEHNIEETEHTEQKRNVIRIIPHHNYNAAINKYNHDIALLELDEPLVLNSYVTPICIADKEYTNIFLKFGSGYVSGWGRVFHKGRSALVLQYLRVPLVDRATCLLSTKFTIYNNMFCAGFHEGGRDSCQGDSGGPHVTEVEGTSFLTGIISWGEECAMKGKYGIYTKVSRYVNWIKEKTKLTGAGSPGAETALVPRSFLLRNPNDKYEPFWEDEESGAGSPGAETAGAPSPAGSPTSTEEGTSESATPESGPGSEPATSGSETPGTSESATPESGPGTSTEPSEGSAPGTSTEPSEGSAPGTSTEPSEGSAPGTSTEPSEGSAPGTSTEPSEGSAPGTSTEPSEGSAPGSPAGSPTSTEEGTSTEPSEGSAPGASS

SEQ ID NO: 134 - protein, 949 aa, Artificial Sequence
  Description of Artificial Sequence: Synthetic pJH67
MQRVNMIMAESPGLITICLLGYLLSAECTVFLDHENANKILNRPKRYNSGKLEEFVQGNLERECMEEKCSFEEAREVFENTERTTEFWKQYVDGDQCESNPCLNGGSCKDDINSYECWCPFGFEGKNCELDVTCNIKNGRCEQFCKNSADNKVVCSCTEGYRLAENQKSCEPAVPFPCGRVSVSQTSKLTRAETVFPDVDYVNSTEAETILDGAPSPAGSPTSTEEGTSESATPESGPGSEPATSGSETPGTSESATPESGPGTSTEPSEGSAPGTSTEPSEGSAPGTSTEPSEGSAPGTSTEPSEGSAPGTSTEPSEGSAPGTSTEPSEGSAPGSPAGSPTSTEEGTSTEPSEGSAPGASSNITQSTQSFNDFTRVVGGEDAKPGQFPWQVVLNGKVDAFCGGSIVNEKWIVTAAHCVETGVKITVVAGEHNIEETEHTEQKRNVIRIIPHHNYNAAINKYNHDIALLELDEPLVLNSYVTPICIADKEYTNIFLKFGSGYVSGWGRVFHKGRSALVLQYLRVPLVDRATCLLSTKFTIYNNMFCAGFHEGGRDSCQGDSGGPHVTEVEGTSFLTGIISWGEECAMKGKYGIYTKVSRYVNWIKEKTKLTGAGSPGAETALVPRSFLLRNPNDKYEPFWEDEESGAGSPGAETAGAPGTSESATPESGPGSEPATSGSETPGTSESATPESGPGSEPATSGSETPGTSESATPESGPGTSTEPSEGSAPGSPAGSPTSTEEGTSESATPESGPGSEPATSGSETPGTSESATPESGPGSPAGSPTSTEEGSPAGSPTSTEEGTSTEPSEGSAPGTSESATPESGPGTSESATPESGPGTSESATPESGPGSEPATSGSETPGSEPATSGSETPGSPAGSPTSTEEGTSTEPSEGSAPGTSTEPSEGSAPGSEPATSGSETPGTSESATPESGPGTSTEPSEGSAPASS

SEQ ID NO: 135 - protein, 545 aa, Artificial Sequence
  Description of Artificial Sequence: Synthetic pJH68
MQRVNMIMAESPGLITICLLGYLLSAECTVFLDHENANKILNRPKRYNSGKLEEFVQGNLERECMEEKCSFEEAREVFENTERTTEFWKQYVDGDQCESNPCLNGGSCKDDINSYECWCPFGFEGKNCELDVTCNIKNGRCEQFCKNSADNGAPGSPAGSPTSTEEGTSESATPESGPGSEPATSGSETPASSKVVCSCTEGYRLAENQKSCEPAVPFPCGRVSVSQTSKLTRAETVFPDVDYVNSTEAETILDGAPGSPAGSPTSTEEGTSESATPESGPGSEPATSGSETPASSNITQSTQSFNDFTRVVGGEDAKPGQFPWQVVLNGKVDAFCGGSIVNEKWIVTAAHCVETGVKITVVAGEHNIEETEHTEQKRNVIRIIPHHNYNAAINKYNHDIALLELDEPLVLNSYVTPICIADKEYTNIFLKFGSGYVSGWGRVFHKGRSALVLQYLRVPLVDRATCLLSTKFTIYNNMFCAGFHEGGRDSCQGDSGGPHVTEVEGTSFLTGIISWGEECAMKGKYGIYTKVSRYVNWIKEKTKLT

SEQ ID NO: 136 - protein, 581 aa, Artificial Sequence
  Description of Artificial Sequence: Synthetic pJH69
MQRVNMIMAESPGLITICLLGYLLSAECTVFLDHENANKILNRPKRYNSGKLEEFVQGNLERECMEEKCSFEEAREVFENTERTTEFWKQYVDGDQCESNPCLNGGSCKDDINSYECWCPFGFEGKNCELDVTCNIKNGRCEQFCKNSADNGAPGSPAGSPTSTEEGTSESATPESGPGSEPATSGSETPASSKVVCSCTEGYRLAENQKSCEPAVPFPCGRVSVSQTSKLTRAETVFPDVDYVNSTEAETILDGAPSPAGSPTSTEEGTSESATPESGPGSEPATSGSETPGTSESATPESGPGTSTEPSEGSAPGTSTEPSEGSAPGASSNITQSTQSFNDFTRVVGGEDAKPGQFPWQVVLNGKVDAFCGGSIVNEKWIVTAAHCVETGVKITVVAGEHNIEETEHTEQKRNVIRIIPHHNYNAAINKYNHDIALLELDEPLVLNSYVTPICIADKEYTNIFLKFGSGYVSGWGRVFHKGRSALVLQYLRVPLVDRATCLLSTKFTIYNNMFCAGFHEGGRDSCQGDSGGPHVTEVEGTSFLTGIISWGEECAMKGKYGIYTKVSRYVNWIKEKTKLT

SEQ ID NO: 137 - protein, 653 aa, Artificial Sequence
  Description of Artificial Sequence: Synthetic pJH70
MQRVNMIMAESPGLITICLLGYLLSAECTVFLDHENANKILNRPKRYNSGKLEEFVQGNLERECMEEKCSFEEAREVFENTERTTEFWKQYVDGDQCESNPCLNGGSCKDDINSYECWCPFGFEGKNCELDVTCNIKNGRCEQFCKNSADNGAPGSPAGSPTSTEEGTSESATPESGPGSEPATSGSETPASSKVVCSCTEGYRLAENQKSCEPAVPFPCGRVSVSQTSKLTRAETVFPDVDYVNSTEAETILDGAPSPAGSPTSTEEGTSESATPESGPGSEPATSGSETPGTSESATPESGPGTSTEPSEGSAPGTSTEPSEGSAPGTSTEPSEGSAPGTSTEPSEGSAPGTSTEPSEGSAPGTSTEPSEGSAPGSPAGSPTSTEEGTSTEPSEGSAPGASSNITQSTQSFNDFTRVVGGEDAKPGQFPWQVVLNGKVDAFCGGSIVNEKWIVTAAHCVETGVKITVVAGEHNIEETEHTEQKRNVIRIIPHHNYNAAINKYNHDIALLELDEPLVLNSYVTPICIADKEYTNIFLKFGSGYVSGWGRVFHKGRSALVLQYLRVPLVDRATCLLSTKFTIYNNMFCAGFHEGGRDSCQGDSGGPHVTEVEGTSFLTGIISWGEECAMKGKYGIYTKVSRYVNWIKEKTKLT

SEQ ID NO: 138 - protein, 625 aa, Artificial Sequence
  Description of Artificial Sequence: Synthetic pJH71
MQRVNMIMAESPGLITICLLGYLLSAECTVFLDHENANKILNRPKRYNSGKLEEFVQGNLERECMEEKCSFEEAREVFENTERTTEFWKQYVDGDQCESNPCLNGGSCKDDINSYECWCPFGFEGKNCELDVTCNIKNGRCEQFCKNSADNGAPGSPAGSPTSTEEGTSESATPESGPGSEPATSGSETPASSKVVCSCTEGYRLAENQKSCEPAVPFPCGRVSVSQTSKLTRAETVFPDVDYVNSTEAETILDNITQSTQSFNDFTRVVGGEDAKPGQFPWQVVLNGKVDAFCGGSIVNEKWIVTAAHCVETGVKITVVAGEHNIEETEHTEQKRNVIRIIPHHNYNAAINKYNHDIALLELDEPLVLNSYVTPICIADKEYTNIFLKFGSGYVSGWGRVFHKGRSALVLQYLRVPLVDRATCLLSTKFTIYNNMFCAGFHEGGRDSCQGDSGGPHVTEVEGTSFLTGIISWGEECAMKGKYGIYTKVSRYVNWIKEKTKLTGAGSPGAETALVPRSFLLRNPNDKYEPFWEDEESGAGSPGAETAGAPTSESATPESGPGSEPATSGSETPGTSESATPESGPGSEPATSGSETPGTSESATPESGPGTSTEPSEGSAPGASS

SEQ ID NO: 139 - protein, 697 aa, Artificial Sequence
  Description of Artificial Sequence: Synthetic pJH72
MQRVNMIMAESPGLITICLLGYLLSAECTVFLDHENANKILNRPKRYNSGKLEEFVQGNLERECMEEKCSFEEAREVFENTERTTEFWKQYVDGDQCESNPCLNGGSCKDDINSYECWCPFGFEGKNCELDVTCNIKNGRCEQFCKNSADNGAPGSPAGSPTSTEEGTSESATPESGPGSEPATSGSETPASSKVVCSCTEGYRLAENQKSCEPAVPFPCGRVSVSQTSKLTRAETVFPDVDYVNSTEAETILDNITQSTQSFNDFTRVVGGEDAKPGQFPWQVVLNGKVDAFCGGSIVNEKWIVTAAHCVETGVKITVVAGEHNIEETEHTEQKRNVIRIIPHHNYNAAINKYNHDIALLELDEPLVLNSYVTPICIADKEYTNIFLKFGSGYVSGWGRVFHKGRSALVLQYLRVPLVDRATCLLSTKFTIYNNMFCAGFHEGGRDSCQGDSGGPHVTEVEGTSFLTGIISWGEECAMKGKYGIYTKVSRYVNWIKEKTKLTGAGSPGAETALVPRSFLLRNPNDKYEPFWEDEESGAGSPGAETAGAPSPAGSPTSTEEGTSESATPESGPGSEPATSGSETPGTSESATPESGPGTSTEPSEGSAPGTSTEPSEGSAPGTSTEPSEGSAPGTSTEPSEGSAPGTSTEPSEGSAPGTSTEPSEGSAPGSPAGSPTSTEEGTSTEPSEGSAPGASS

SEQ ID NO: 140 - protein, 841 aa, Artificial Sequence
  Description of Artificial Sequence: Synthetic pJH73
MQRVNMIMAESPGLITICLLGYLLSAECTVFLDHENANKILNRPKRYNSGKLEEFVQGNLERECMEEKCSFEEAREVFENTERTTEFWKQYVDGDQCESNPCLNGGSCKDDINSYECWCPFGFEGKNCELDVTCNIKNGRCEQFCKNSADNGAPGSPAGSPTSTEEGTSESATPESGPGSEPATSGSETPASSKVVCSCTEGYRLAENQKSCEPAVPFPCGRVSVSQTSKLTRAETVFPDVDYVNSTEAETILDNITQSTQSFNDFTRVVGGEDAKPGQFPWQVVLNGKVDAFCGGSIVNEKWIVTAAHCVETGVKITVVAGEHNIEETEHTEQKRNVIRIIPHHNYNAAINKYNHDIALLELDEPLVLNSYVTPICIADKEYTNIFLKFGSGYVSGWGRVFHKGRSALVLQYLRVPLVDRATCLLSTKFTIYNNMFCAGFHEGGRDSCQGDSGGPHVTEVEGTSFLTGIISWGEECAMKGKYGIYTKVSRYVNWIKEKTKLTGAGSPGAETALVPRSFLLRNPNDKYEPFWEDEESGAGSPGAETAGAPGTSESATPESGPGSEPATSGSETPGTSESATPESGPGSEPATSGSETPGTSESATPESGPGTSTEPSEGSAPGSPAGSPTSTEEGTSESATPESGPGSEPATSGSETPGTSESATPESGPGSPAGSPTSTEEGSPAGSPTSTEEGTSTEPSEGSAPGTSESATPESGPGTSESATPESGPGTSESATPESGPGSEPATSGSETPGSEPATSGSETPGSPAGSPTSTEEGTSTEPSEGSAPGTSTEPSEGSAPGSEPATSGSETPGTSESATPESGPGTSTEPSEGSAPASS

SEQ ID NO: 141 - protein, 545 aa, Artificial Sequence
  Description of Artificial Sequence: Synthetic pJH74
MQRVNMIMAESPGLITICLLGYLLSAECTVFLDHENANKILNRPKRYNSGKLEEFVQGNLERECMEEKCSFEEAREVFENTERTTEFWKQYVDGDQCESNPCLNGGSCKDDINSYECWCPFGFEGKNCELDVTCNIKNGRCEQFCKNSADNGAPGSPAGSPTSTEEGTSESATPESGPGSEPATSGSETPASSKVVCSCTEGYRLAENQKSCEPAVPFPCGRVSVSQTSKLTRAETVFPDVDYVNSTEAETILDNITQSTQSFNDFTRVVGGEDAKPGQFPWQVVLNGKVDAFCGGSIVNEKWIVTAAHCVEGAPGSPAGSPTSTEEGTSESATPESGPGSEPATSGSETPASSTGVKITVVAGEHNIEETEHTEQKRNVIRIIPHHNYNAAINKYNHDIALLELDEPLVLNSYVTPICIADKEYTNIFLKFGSGYVSGWGRVFHKGRSALVLQYLRVPLVDRATCLLSTKFTIYNNMFCAGFHEGGRDSCQGDSGGPHVTEVEGTSFLTGIISWGEECAMKGKYGIYTKVSRYVNWIKEKTKLT

SEQ ID NO: 142 - protein, 545 aa, Artificial Sequence
  Description of Artificial Sequence: Synthetic pJH75
MQRVNMIMAESPGLITICLLGYLLSAECTVFLDHENANKILNRPKRYNSGKLEEFVQGNLERECMEEKCSFEEAREVFENTERTTEFWKQYVDGDQCESNPCLNGGSCKDDINSYECWCPFGFEGKNCELDVTCNIKNGRCEQFCKNSADNKVVCSCTEGYRLAENQKSCEPAVPFPCGRVSVSQTSKLTRAETVFPDVDYVNSTEAETILDGAPGSPAGSPTSTEEGTSESATPESGPGSEPATSGSETPASSNITQSTQSFNDFTRVVGGEDAKPGQFPWQVVLNGKVDAFCGGSIVNEKWIVTAAHCVEGAPGSPAGSPTSTEEGTSESATPESGPGSEPATSGSETPASSTGVKITVVAGEHNIEETEHTEQKRNVIRIIPHHNYNAAINKYNHDIALLELDEPLVLNSYVTPICIADKEYTNIFLKFGSGYVSGWGRVFHKGRSALVLQYLRVPLVDRATCLLSTKFTIYNNMFCAGFHEGGRDSCQGDSGGPHVTEVEGTSFLTGIISWGEECAMKGKYGIYTKVSRYVNWIKEKTKLT

SEQ ID NO: 143 - protein, 581 aa, Artificial Sequence
  Description of Artificial Sequence: Synthetic pJH76
MQRVNMIMAESPGLITICLLGYLLSAECTVFLDHENANKILNRPKRYNSGKLEEFVQGNLERECMEEKCSFEEAREVFENTERTTEFWKQYVDGDQCESNPCLNGGSCKDDINSYECWCPFGFEGKNCELDVTCNIKNGRCEQFCKNSADNKVVCSCTEGYRLAENQKSCEPAVPFPCGRVSVSQTSKLTRAETVFPDVDYVNSTEAETILDGAPSPAGSPTSTEEGTSESATPESGPGSEPATSGSETPGTSESATPESGPGTSTEPSEGSAPGTSTEPSEGSAPGASSNITQSTQSFNDFTRVVGGEDAKPGQFPWQVVLNGKVDAFCGGSIVNEKWIVTAAHCVEGAPGSPAGSPTSTEEGTSESATPESGPGSEPATSGSETPASSTGVKITVVAGEHNIEETEHTEQKRNVIRIIPHHNYNAAINKYNHDIALLELDEPLVLNSYVTPICIADKEYTNIFLKFGSGYVSGWGRVFHKGRSALVLQYLRVPLVDRATCLLSTKFTIYNNMFCAGFHEGGRDSCQGDSGGPHVTEVEGTSFLTGIISWGEECAMKGKYGIYTKVSRYVNWIKEKTKLT

SEQ ID NO: 144 - protein, 589 aa, Artificial Sequence
  Description of Artificial Sequence: Synthetic pJH77
MEEKCSFEEAREVFENTERTTEFWKQYVDGDQCESNPCLNGGSCKDDINSYECWCPFGFEGKNCELDVTCNIKNGRCEQFCKNSADNKVVCSCTEGYRLAENQKSCEPAVPFPCGRVSVSQTSKLTRAETVFPDVDYVNSTEAETILDGAPSPAGSPTSTEEGTSESATPESGPGSEPATSGSETPGTSESATPESGPGTSTEPSEGSAPGTSTEPSEGSAPGTSTEPSEGSAPGTSTEPSEGSAPGTSTEPSEGSAPGTSTEPSEGSAPGSPAGSPTSTEEGTSTEPSEGSAPGASSNITQSTQSFNDFTRVVGGEDAKPGQFPWQVVLNGKVDAFCGGSIVNEKWIVTAAHCVEGAPGSPAGSPTSTEEGTSESATPESGPGSEPATSGSETPASSTGVKITVVAGEHNIEETEHTEQKRNVIRIIPHHNYNAAINKYNHDIALLELDEPLVLNSYVTPICIADKEYTNIFLKFGSGYVSGWGRVFHKGRSALVLQYLRVPLVDRATCLLSTKFTIYNNMFCAGFHEGGRDSCQGDSGGPHVTEVEGTSFLTGIISWGEECAMKGKYGIYTKVSRYVNWIKEKTKLT

SEQ ID NO: 145 - protein, 625 aa, Artificial Sequence
  Description of Artificial Sequence: Synthetic pJH78
MQRVNMIMAESPGLITICLLGYLLSAECTVFLDHENANKILNRPKRYNSGKLEEFVQGNLERECMEEKCSFEEAREVFENTERTTEFWKQYVDGDQCESNPCLNGGSCKDDINSYECWCPFGFEGKNCELDVTCNIKNGRCEQFCKNSADNKVVCSCTEGYRLAENQKSCEPAVPFPCGRVSVSQTSKLTRAETVFPDVDYVNSTEAETILDNITQSTQSFNDFTRVVGGEDAKPGQFPWQVVLNGKVDAFCGGSIVNEKWIVTAAHCVEGAPGSPAGSPTSTEEGTSESATPESGPGSEPATSGSETPASSTGVKITVVAGEHNIEETEHTEQKRNVIRIIPHHNYNAAINKYNHDIALLELDEPLVLNSYVTPICIADKEYTNIFLKFGSGYVSGWGRVFHKGRSALVLQYLRVPLVDRATCLLSTKFTIYNNMFCAGFHEGGRDSCQGDSGGPHVTEVEGTSFLTGIISWGEECAMKGKYGIYTKVSRYVNWIKEKTKLTGAGSPGAETALVPRSFLLRNPNDKYEPFWEDEESGAGSPGAETAGAPTSESATPESGPGSEPATSGSETPGTSESATPESGPGSEPATSGSETPGTSESATPESGPGTSTEPSEGSAPGASS

SEQ ID NO: 146 - protein, 697 aa, Artificial Sequence
  Description of Artificial Sequence: Synthetic pJH79
MQRVNMIMAESPGLITICLLGYLLSAECTVFLDHENANKILNRPKRYNSGKLEEFVQGNLERECMEEKCSFEEAREVFENTERTTEFWKQYVDGDQCESNPCLNGGSCKDDINSYECWCPFGFEGKNCELDVTCNIKNGRCEQFCKNSADNKVVCSCTEGYRLAENQKSCEPAVPFPCGRVSVSQTSKLTRAETVFPDVDYVNSTEAETILDNITQSTQSFNDFTRVVGGEDAKPGQFPWQVVLNGKVDAFCGGSIVNEKWIVTAAHCVEGAPGSPAGSPTSTEEGTSESATPESGPGSEPATSGSETPASSTGVKITVVAGEHNIEETEHTEQKRNVIRIIPHHNYNAAINKYNHDIALLELDEPLVLNSYVTPICIADKEYTNIFLKFGSGYVSGWGRVFHKGRSALVLQYLRVPLVDRATCLLSTKFTIYNNMFCAGFHEGGRDSCQGDSGGPHVTEVEGTSFLTGIISWGEECAMKGKYGIYTKVSRYVNWIKEKTKLTGAGSPGAETALVPRSFLLRNPNDKYEPFWEDEESGAGSPGAETAGAPSPAGSPTSTEEGTSESATPESGPGSEPATSGSETPGTSESATPESGPGTSTEPSEGSAPGTSTEPSEGSAPGTSTEPSEGSAPGTSTEPSEGSAPGTSTEPSEGSAPGTSTEPSEGSAPGSPAGSPTSTEEGTSTEPSEGSAPGASS

SEQ ID NO: 147 - protein, 841 aa, Artificial Sequence
  Description of Artificial Sequence: Synthetic pJH80
MQRVNMIMAESPGLITICLLGYLLSAECTVFLDHENANKILNRPKRYNSGKLEEFVQGNLERECMEEKCSFEEAREVFENTERTTEFWKQYVDGDQCESNPCLNGGSCKDDINSYECWCPFGFEGKNCELDVTCNIKNGRCEQFCKNSADNKVVCSCTEGYRLAENQKSCEPAVPFPCGRVSVSQTSKLTRAETVFPDVDYVNSTEAETILDNITQSTQSFNDFTRVVGGEDAKPGQFPWQVVLNGKVDAFCGGSIVNEKWIVTAAHCVEGAPGSPAGSPTSTEEGTSESATPESGPGSEPATSGSETPASSTGVKITVVAGEHNIEETEHTEQKRNVIRIIPHHNYNAAINKYNHDIALLELDEPLVLNSYVTPICIADKEYTNIFLKFGSGYVSGWGRVFHKGRSALVLQYLRVPLVDRATCLLSTKFTIYNNMFCAGFHEGGRDSCQGDSGGPHVTEVEGTSFLTGIISWGEECAMKGKYGIYTKVSRYVNWIKEKTKLTGAGSPGAETALVPRSFLLRNPNDKYEPFWEDEESGAGSPGAETAGAPGTSESATPESGPGSEPATSGSETPGTSESATPESGPGSEPATSGSETPGTSESATPESGPGTSTEPSEGSAPGSPAGSPTSTEEGTSESATPESGPGSEPATSGSETPGTSESATPESGPGSPAGSPTSTEEGSPAGSPTSTEEGTSTEPSEGSAPGTSESATPESGPGTSESATPESGPGTSESATPESGPGSEPATSGSETPGSEPATSGSETPGSPAGSPTSTEEGTSTEPSEGSAPGTSTEPSEGSAPGSEPATSGSETPGTSESATPESGPGTSTEPSEGSAPASS

SEQ ID NO: 148 - protein, 977 aa, Artificial Sequence
  Description of Artificial Sequence: Synthetic pJH81
MQRVNMIMAESPGLITICLLGYLLSAECTVFLDHENANKILNRPKRYNSGKLEEFVQGNLERECMEEKCSFEEAREVFENTERTTEFWKQYVDGDQCESNPCLNGGSCKDDINSYECWCPFGFEGKNCELDVTCNIKNGRCEQFCKNSADNGAPGSPAGSPTSTEEGTSESATPESGPGSEPATSGSETPASSKVVCSCTEGYRLAENQKSCEPAVPFPCGRVSVSQTSKLTRAETVFPDVDYVNSTEAETILDNITQSTQSFNDFTRVVGGEDAKPGQFPWQVVLNGKVDAFCGGSIVNEKWIVTAAHCVETGVKITVVAGEHNIEETEHTEQKRNVIRIIPHHNYNAAINKYNHDIALLELDEPLVLNSYVTPICIADKEYTNIFLKFGSGYVSGWGRVFHKGRSALVLQYLRVPLVDRATCLLSTKFTIYNNMFCAGFHEGGRDSCQGDSGGPHVTEVEGTSFLTGIISWGEECAMKGKYGIYTKVSRYVNWIKEKTKLTDKTHTCPPCPAPELLGGPSVFLFPPKPKDTLMISRTPEVTCVVVDVSHEDPEVKFNWYVDGVEVHNAKTKPREEQYNSTYRVVSVLTVLHQDWLNGKEYKCKVSNKALPAPIEKTISKAKGQPREPQVYTLPPSRDELTKNQVSLTCLVKGFYPSDIAVEWESNGQPENNYKTTPPVLDSDGSFFLYSKLTVDKSRWQQGNVFSCSVMHEALHNHYTQKSLSLSPGKGGGGSGGGGSGGGGSGGGGSDKTHTCPPCPAPELLGGPSVFLFPPKPKDTLMISRTPEVTCVVVDVSHEDPEVKFNWYVDGVEVHNAKTKPREEQYNSTYRVVSVLTVLHQDWLNGKEYKCKVSNKALPAPIEKTISKAKGQPREPQVYTLPPSRDELTKNQVSLTCLVKGFYPSDIAVEWESNGQPENNYKTTPPVLDSDGSFFLYSKLTVDKSRWQQGNVFSCSVMHEALHNHYTQKSLSLSPGK

SEQ ID NO: 149 - protein, 977 aa, Artificial Sequence
  Description of Artificial Sequence: Synthetic pJH82
MQRVNMIMAESPGLITICLLGYLLSAECTVFLDHENANKILNRPKRYNSGKLEEFVQGNLERECMEEKCSFEEAREVFENTERTTEFWKQYVDGDQCESNPCLNGGSCKDDINSYECWCPFGFEGKNCELDVTCNIKNGRCEQFCKNSADNKVVCSCTEGYRLAENQKSCEPAVPFPCGRVSVSQTSKLTRAETVFPDVDYVNSTEAETILDNITQSTQSFNDFTRVVGGEDAKPGQFPWQVVLNGKVDAFCGGSIVNEKWIVTAAHCVEGAPGSPAGSPTSTEEGTSESATPESGPGSEPATSGSETPASSTGVKITVVAGEHNIEETEHTEQKRNVIRIIPHHNYNAAINKYNHDIALLELDEPLVLNSYVTPICIADKEYTNIFLKFGSGYVSGWGRVFHKGRSALVLQYLRVPLVDRATCLLSTKFTIYNNMFCAGFHEGGRDSCQGDSGGPHVTEVEGTSFLTGIISWGEECAMKGKYGIYTKVSRYVNWIKEKTKLTDKTHTCPPCPAPELLGGPSVFLFPPKPKDTLMISRTPEVTCVVVDVSHEDPEVKFNWYVDGVEVHNAKTKPREEQYNSTYRVVSVLTVLHQDWLNGKEYKCKVSNKALPAPIEKTISKAKGQPREPQVYTLPPSRDELTKNQVSLTCLVKGFYPSDIAVEWESNGQPENNYKTTPPVLDSDGSFFLYSKLTVDKSRWQQGNVFSCSVMHEALHNHYTQKSLSLSPGKGGGGSGGGGSGGGGSGGGGSDKTHTCPPCPAPELLGGPSVFLFPPKPKDTLMISRTPEVTCVVVDVSHEDPEVKFNWYVDGVEVHNAKTKPREEQYNSTYRVVSVLTVLHQDWLNGKEYKCKVSNKALPAPIEKTISKAKGQPREPQVYTLPPSRDELTKNQVSLTCLVKGFYPSDIAVEWESNGQPENNYKTTPPVLDSDGSFFLYSKLTVDKSRWQQGNVFSCSVMHEALHNHYTQKSLSLSPGK

SEQ ID NO: 150 - protein, 977 aa, Artificial Sequence
  Description of Artificial Sequence: Synthetic pJH83
MQRVNMIMAESPGLITICLLGYLLSAECTVFLDHENANKILNRPKRYNSGKLEEFVQGNLERECMEEKCSFEEAREVFENTERTTEFWKQYVDGDQCESNPCLNGGSCKDDINSYECWCPFGFEGKNCELDVTCNIKNGRCEQFCKNSADNKVVCSCTEGYRLAENQKSCEPAVPFPCGRVSVSQTSKLTRAETVFPDVDYVNSTEAETILDGAPGSPAGSPTSTEEGTSESATPESGPGSEPATSGSETPASSNITQSTQSFNDFTRVVGGEDAKPGQFPWQVVLNGKVDAFCGGSIVNEKWIVTAAHCVETGVKITVVAGEHNIEETEHTEQKRNVIRIIPHHNYNAAINKYNHDIALLELDEPLVLNSYVTPICIADKEYTNIFLKFGSGYVSGWGRVFHKGRSALVLQYLRVPLVDRATCLLSTKFTIYNNMFCAGFHEGGRDSCQGDSGGPHVTEVEGTSFLTGIISWGEECAMKGKYGIYTKVSRYVNWIKEKTKLTDKTHTCPPCPAPELLGGPSVFLFPPKPKDTLMISRTPEVTCVVVDVSHEDPEVKFNWYVDGVEVHNAKTKPREEQYNSTYRVVSVLTVLHQDWLNGKEYKCKVSNKALPAPIEKTISKAKGQPREPQVYTLPPSRDELTKNQVSLTCLVKGFYPSDIAVEWESNGQPENNYKTTPPVLDSDGSFFLYSKLTVDKSRWQQGNVFSCSVMHEALHNHYTQKSLSLSPGKGGGGSGGGGSGGGGSGGGGSDKTHTCPPCPAPELLGGPSVFLFPPKPKDTLMISRTPEVTCVVVDVSHEDPEVKFNWYVDGVEVHNAKTKPREEQYNSTYRVVSVLTVLHQDWLNGKEYKCKVSNKALPAPIEKTISKAKGQPREPQVYTLPPSRDELTKNQVSLTCLVKGFYPSDIAVEWESNGQPENNYKTTPPVLDSDGSFFLYSKLTVDKSRWQQGNVFSCSVMHEALHNHYTQKSLSLSPGK

SEQ ID NO: 151 - protein, 1013 aa, Artificial Sequence
  Description of Artificial Sequence: Synthetic pJH84
MQRVNMIMAESPGLITICLLGYLLSAECTVFLDHENANKILNRPKRYNSGKLEEFVQGNLERECMEEKCSFEEAREVFENTERTTEFWKQYVDGDQCESNPCLNGGSCKDDINSYECWCPFGFEGKNCELDVTCNIKNGRCEQFCKNSADNKVVCSCTEGYRLAENQKSCEPAVPFPCGRVSVSQTSKLTRAETVFPDVDYVNSTEAETILDGAPSPAGSPTSTEEGTSESATPESGPGSEPATSGSETPGTSESATPESGPGTSTEPSEGSAPGTSTEPSEGSAPGASSNITQSTQSFNDFTRVVGGEDAKPGQFPWQVVLNGKVDAFCGGSIVNEKWIVTAAHCVETGVKITVVAGEHNIEETEHTEQKRNVIRIIPHHNYNAAINKYNHDIALLELDEPLVLNSYVTPICIADKEYTNIFLKFGSGYVSGWGRVFHKGRSALVLQYLRVPLVDRATCLLSTKFTIYNNMFCAGFHEGGRDSCQGDSGGPHVTEVEGTSFLTGIISWGEECAMKGKYGIYTKVSRYVNWIKEKTKLTDKTHTCPPCPAPELLGGPSVFLFPPKPKDTLMISRTPEVTCVVVDVSHEDPEVKFNWYVDGVEVHNAKTKPREEQYNSTYRVVSVLTVLHQDWLNGKEYKCKVSNKALPAPIEKTISKAKGQPREPQVYTLPPSRDELTKNQVSLTCLVKGFYPSDIAVEWESNGQPENNYKTTPPVLDSDGSFFLYSKLTVDKSRWQQGNVFSCSVMHEALHNHYTQKSLSLSPGKGGGGSGGGGSGGGGSGGGGSDKTHTCPPCPAPELLGGPSVFLFPPKPKDTLMISRTPEVTCVVVDVSHEDPEVKFNWYVDGVEVHNAKTKPREEQYNSTYRVVSVLTVLHQDWLNGKEYKCKVSNKALPAPIEKTISKAKGQPREPQVYTLPPSRDELTKNQVSLTCLVKGFYPSDIAVEWESNGQPENNYKTTPPVLDSDGSFFLYSKLTVDKSRWQQGNVFSCSVMHEALHNHYTQKSLSLSPGK

SEQ ID NO: 152 - protein, 1024 aa, Artificial Sequence
  Description of Artificial Sequence: Synthetic pJH85
MQRVNMIMAESPGLITICLLGYLLSAECTVFLDHENANKILNRPKRYNSGKLEEFVQGNLERECMEEKCSFEEAREVFENTERTTEFWKQYVDGDQCESNPCLNGGSCKDDINSYECWCPFGFEGKNCELDVTCNIKNGRCEQFCKNSADNKVVCSCTEGYRLAENQKSCEPAVPFPCGRVSVSQTSKLTRAETVFPDVDYVNSTEAETILDGAPSPAGSPTSTEEGTSESATPESGPGSEPATSGSETPGTSESATPESGPGTSTEPSEGSAPGTSTEPSEGSAPGTSTEPSEGSAPGTSTEPSEGSAPGTSTEPSEGSAPGTSTEPSEGSAPGSPAGSPTSTEEGTSTEPSEGSAPGASSNITQSTQSFNDFTRVVGGEDAKPGQFPWQVVLNGKVDAFCGGSIVNEKWIVTAAHCVETGVKITVVAGEHNIEETEHTEQKRNVIRIIPHHNYNAAINKYNHDIALLELDEPLVLNSYVTPICIADKEYTNIFLKFGSGYVSGWGRVFHKGRSALVLQYLRVPLVDRATCLLSTKFTIYNNMFCAGFHEGGRDSCQGDSGGPHVTEVEGTSFLTGIISWGEECAMKGKYGIYTKVSRYVNWIKEKTKLTDKTHTCPPCPAPELLGGPSVFLFPPKPKDTLMISRTPEVTCVVVDVSHEDPEVKFNWYVDGVEVHNAKTKPREEQYNSTYRVVSVLTVLHQDWLNGKEYKCKVSNKALPAPIEKTISKAKGQPREPQVYTLPPSRDELTKNQVSLTCLVKGFYPSDIAVEWESNGQPENNYKTTPPVLDSDGSFFLYSKLTVDKSRWQQGNVFSCSVMHEALHNHYTQKSLSLSPGKGGGGSGGGGSGGGGSGGGGSDKTHTCPPCPAPELLGGPSVFLFPPKPKDTLMISRTPEVTCVVVDVSHEDPEVKFNWYVDGVEVHNAKTKPREEQYNSTYRVVSVLTVLHQDWLNGKEYKCKVSNKALPAPIEKTISKAKGQPREPQVYTLPPSRDELTKNQVSLTCLVKGFYPSDIAVEWESNGQ

SEQ ID NO: 153 - protein, 935 aa, Artificial Sequence
  Description of Artificial Sequence: Synthetic pJH56
MQRVNMIMAESPGLITICLLGYLLSAECTVFLDHENANKILNRPKRYNSGKLEEFVQGNLERECMEEKCSFEEAREVFENTERTTEFWKQYVDGDQCESNPCLNGGSCKDDINSYECWCPFGFEGKNCELDVTCNIKNGRCEQFCKNSADNKVVCSCTEGYRLAENQKSCEPAVPFPCGRVSVSQTSKLTRAETVFPDVDYVNSTEAETILDNITQSTQSFNDFTRVVGGEDAKPGQFPWQVVLNGKVDAFCGGSIVNEKWIVTAAHCVETGVKITVVAGEHNIEETEHTEQKRNVIRIIPHHNYNAAINKYNHDIALLELDEPLVLNSYVTPICIADKEYTNIFLKFGSGYVSGWGRVFHKGRSALVLQYLRVPLVDRATCLLSTKFTIYNNMFCAGFHEGGRDSCQGDSGGPHVTEVEGTSFLTGIISWGEECAMKGKYGIYTKVSRYVNWIKEKTKLTDKTHTCPPCPAPELLGGPSVFLFPPKPKDTLMISRTPEVTCVVVDVSHEDPEVKFNWYVDGVEVHNAKTKPREEQYNSTYRVVSVLTVLHQDWLNGKEYKCKVSNKALPAPIEKTISKAKGQPREPQVYTLPPSRDELTKNQVSLTCLVKGFYPSDIAVEWESNGQPENNYKTTPPVLDSDGSFFLYSKLTVDKSRWQQGNVFSCSVMHEALHNHYTQKSLSLSPGKGGGGSGGGGSGGGGSGGGGSDKTHTCPPCPAPELLGGPSVFLFPPKPKDTLMISRTPEVTCVVVDVSHEDPEVKFNWYVDGVEVHNAKTKPREEQYNSTYRVVSVLTVLHQDWLNGKEYKCKVSNKALPAPIEKTISKAKGQPREPQVYTLPPSRDELTKNQVSLTCLVKGFYPSDIAVEWESNGQPENNYKTTPPVLDSDGSFFLYSKLTVDKSRWQQGNVFSCSVMHEALHNHYTQKSLSLSPGK

SEQ ID NO: 154 - protein, 20 aa, Artificial Sequence
  Description of Artificial Sequence: Synthetic PAS peptide
ASPAAPAPASPAAPAPSAPA

SEQ ID NO: 155 - protein, 20 aa, Artificial Sequence
  Description of Artificial Sequence: Synthetic PAS peptide
AAPASPAPAAPSAPAPAAPS

SEQ ID NO: 156 - protein, 20 aa, Artificial Sequence
  Description of Artificial Sequence: Synthetic PAS peptide
APSSPSPSAPSSPSPASPSS

SEQ ID NO: 157 - protein, 19 aa, Artificial Sequence
  Description of Artificial Sequence: Synthetic PAS peptide
APSSPSPSAPSSPSPASPS

SEQ ID NO: 158 - protein, 20 aa, Artificial Sequence
  Description of Artificial Sequence: Synthetic PAS peptide
SSPSAPSPSSPASPSPSSPA

SEQ ID NO: 159 - protein, 24 aa, Artificial Sequence
  Description of Artificial Sequence: Synthetic PAS peptide
AASPAAPSAPPAAASPAAPSAPPA

SEQ ID NO: 160 - protein, 20 aa, Artificial Sequence
  Description of Artificial Sequence: Synthetic PAS peptide
ASAAAPAAASAAASAPSAAA

SEQ ID NO: 161 - protein, 5 aa, Artificial Sequence
  Description of Artificial Sequence: Synthetic Gly-Ser peptide linker
GGGGS

SEQ ID NO: 162 - protein, 10 aa, Artificial Sequence
  Description of Artificial Sequence: Synthetic Gly-Ser peptide linker
GGGGSGGGGS

SEQ ID NO: 163 - protein, 11 aa, Artificial Sequence
  Description of Artificial Sequence: Synthetic albumin-binding peptide core sequence
DICLPRWGCLW

SEQ ID NO: 164 - protein, 32 aa, Artificial Sequence
  Description of Artificial Sequence: Synthetic CTP Peptide
DPRFQDSSSSKAPPPSLPSPSRLPGPSDTPIL

SEQ ID NO: 165 - protein, 28 aa, Artificial Sequence
  Description of Artificial Sequence: Synthetic CTP Peptide
SSSSKAPPPSLPSPSRLPGPSDTPILPQ

SEQ ID NO: 166 - protein, 9 aa, Artificial Sequence
  Description of Artificial Sequence: Synthetic FXIa cleavage site
TQSFNDFTR

SEQ ID NO: 167 - protein, 10 aa, Artificial Sequence
  Description of Artificial Sequence: Synthetic FXIa cleavage site
SVSQTSKLTR

SEQ ID NO: 168 - protein, 10 aa, Artificial Sequence
  Description of Artificial Sequence: Synthetic thrombin cleavage site
DFLAEGGGVR

SEQ ID NO: 169 - protein, 7 aa, Artificial Sequence
  Description of Artificial Sequence: Synthetic thrombin cleavage site
TTKIKPR

SEQ ID NO: 170 - protein, 5 aa, Artificial Sequence
  Description of Artificial Sequence: Synthetic thrombin cleavage site
LVPRG

SEQ ID NO: 171 - protein, 5 aa, Artificial Sequence
  Description of Artificial Sequence: Synthetic thrombin cleavage site
ALRPR

SEQ ID NO: 172 - protein, 15 aa, Artificial Sequence
  Description of Artificial Sequence: Synthetic Gly-Ser peptide linker
GGGGSGGGGSGGGGS

SEQ ID NO: 173 - protein, 20 aa, Artificial Sequence
  Description of Artificial Sequence: Synthetic Gly-Ser peptide linker
GGGGSGGGGSGGGGSGGGGS

SEQ ID NO: 174 - protein, 25 aa, Artificial Sequence
  Description of Artificial Sequence: Synthetic Gly-Ser peptide linker
GGGGSGGGGSGGGGSGGGGSGGGGS

SEQ ID NO: 175 - protein, 30 aa, Artificial Sequence
  Description of Artificial Sequence: Synthetic Gly-Ser peptide linker
GGGGSGGGGSGGGGSGGGGSGGGGSGGGGS

SEQ ID NO: 176 - protein, 35 aa, Artificial Sequence
  Description of Artificial Sequence: Synthetic Gly-Ser peptide linker
GGGGSGGGGSGGGGSGGGGSGGGGSGGGGSGGGGS

SEQ ID NO: 177 - protein, 40 aa, Artificial Sequence
  Description of Artificial Sequence: Synthetic Gly-Ser peptide linker
GGGGSGGGGSGGGGSGGGGSGGGGSGGGGSGGGGSGGGGS

SEQ ID NO: 178 - protein, 45 aa, Artificial Sequence
  Description of Artificial Sequence: Synthetic Gly-Ser peptide linker
GGGGSGGGGSGGGGSGGGGSGGGGSGGGGSGGGGSGGGGSGGGGS

SEQ ID NO: 179 - protein, 50 aa, Artificial Sequence
  Description of Artificial Sequence: Synthetic Gly-Ser peptide linker
GGGGSGGGGSGGGGSGGGGSGGGGSGGGGSGGGGSGGGGSGGGGSGGGGS

SEQ ID NO: 180 - protein, 6 aa, Artificial Sequence
  Description of Artificial Sequence: Synthetic Gly-Ser peptide linker
SGGGGS

SEQ ID NO: 181 - protein, 11 aa, Artificial Sequence
  Description of Artificial Sequence: Synthetic Gly-Ser peptide linker
SGGGGSGGGGS

SEQ ID NO: 182 - protein, 16 aa, Artificial Sequence
  Description of Artificial Sequence: Synthetic Gly-Ser peptide linker
SGGGGSGGGGSGGGGS

SEQ ID NO: 183 - protein, 21 aa, Artificial Sequence
  Description of Artificial Sequence: Synthetic Gly-Ser peptide linker
SGGGGSGGGGSGGGGSGGGGS

SEQ ID NO: 184 - protein, 26 aa, Artificial Sequence
  Description of Artificial Sequence: Synthetic Gly-Ser peptide linker
SGGGGSGGGGSGGGGSGGGGSGGGGS

SEQ ID NO: 185 - protein, 31 aa, Artificial Sequence
  Description of Artificial Sequence: Synthetic Gly-Ser peptide linker
SGGGGSGGGGSGGGGSGGGGSGGGGSGGGGS

SEQ ID NO: 186 - protein, 36 aa, Artificial Sequence
  Description of Artificial Sequence: Synthetic Gly-Ser peptide linker
SGGGGSGGGGSGGGGSGGGGSGGGGSGGGGSGGGGS

SEQ ID NO: 187 - protein, 41 aa, Artificial Sequence
  Description of Artificial Sequence: Synthetic Gly-Ser peptide linker
SGGGGSGGGGSGGGGSGGGGSGGGGSGGGGSGGGGSGGGGS

SEQ ID NO: 188 - protein, 46 aa, Artificial Sequence
  Description of Artificial Sequence: Synthetic Gly-Ser peptide linker
SGGGGSGGGGSGGGGSGGGGSGGGGSGGGGSGGGGSGGGGSGGGGS

SEQ ID NO: 189 - protein, 51 aa, Artificial Sequence
  Description of Artificial Sequence: Synthetic Gly-Ser peptide linker
SGGGGSGGGGSGGGGSGGGGSGGGGSGGGGSGGGGSGGGGSGGGGSGGGGS

SEQ ID NO: 190 - protein, 6 aa, Artificial Sequence
  Description of Artificial Sequence: Synthetic PAR1 Linker Motif
SFLLRN

SEQ ID NO: 191 - protein, 4 aa, Artificial Sequence
  Description of Artificial Sequence: Synthetic PAR1 Linker Motif
PNDK

SEQ ID NO: 192 - protein, 5 aa, Artificial Sequence
  Description of Artificial Sequence: Synthetic PAR1 Linker Motif
PNDKY

SEQ ID NO: 193 - protein, 6 aa, Artificial Sequence
  Description of Artificial Sequence: Synthetic PAR1 Linker Motif
PNDKYE

SEQ ID NO: 194 - protein, 7 aa, Artificial Sequence
  Description of Artificial Sequence: Synthetic PAR1 Linker Motif
PNDKYEP

SEQ ID NO: 195 - protein, 8 aa, Artificial Sequence
  Description of Artificial Sequence: Synthetic PAR1 Linker Motif
PNDKYEPF

SEQ ID NO: 196 - protein, 9 aa, Artificial Sequence
  Description of Artificial Sequence: Synthetic PAR1 Linker Motif
PNDKYEPFW

SEQ ID NO: 197 - protein, 10 aa, Artificial Sequence
  Description of Artificial Sequence: Synthetic PAR1 Linker Motif
PNDKYEPFWE

SEQ ID NO: 198 - protein, 11 aa, Artificial Sequence
  Description of Artificial Sequence: Synthetic PAR1 Linker Motif
PNDKYEPFWED

SEQ ID NO: 199 - protein, 12 aa, Artificial Sequence
  Description of Artificial Sequence: Synthetic PAR1 Linker Motif
PNDKYEPFWEDE

SEQ ID NO: 200 - protein, 13 aa, Artificial Sequence
  Description of Artificial Sequence: Synthetic PAR1 Linker Motif
PNDKYEPFWEDEE

SEQ ID NO: 201 - protein, 14 aa, Artificial Sequence
  Description of Artificial Sequence: Synthetic PAR1 Linker Motif
PNDKYEPFWEDEES

SEQ ID NO: 202 - protein, 72 aa, Artificial Sequence
  Description of Artificial Sequence: Synthetic XTEN_AE72_2A_1
TSTEPSEGSAPGSPAGSPTSTEEGTSTEPSEGSAPGTSTEPSEGSAPGTSESATPESGPGTSTEPSEGSAPG

SEQ ID NO: 203 - protein, 72 aa, Artificial Sequence
  Description of Artificial Sequence: Synthetic XTEN_AE72_2A_2
TSESATPESGPGSEPATSGSETPGTSTEPSEGSAPGTSTEPSEGSAPGTSESATPESGPGTSESATPESGPG

SEQ ID NO: 204 - protein, 72 aa, Artificial Sequence
  Description of Artificial Sequence: Synthetic XTEN_AE72_3B_1
SPAGSPTSTEEGTSESATPESGPGSEPATSGSETPGTSESATPESGPGTSTEPSEGSAPGTSTEPSEGSAPG

SEQ ID NO: 205 - protein, 72 aa, Artificial Sequence
  Description of Artificial Sequence: Synthetic XTEN_AE72_3B_2
TSTEPSEGSAPGTSTEPSEGSAPGTSTEPSEGSAPGTSTEPSEGSAPGSPAGSPTSTEEGTSTEPSEGSAPG

SEQ ID NO: 206 - protein, 72 aa, Artificial Sequence
  Description of Artificial Sequence: Synthetic XTEN_AE72_4A_2
TSESATPESGPGSPAGSPTSTEEGSPAGSPTSTEEGSPAGSPTSTEEGTSESATPESGPGTSTEPSEGSAPG

SEQ ID NO: 207 - protein, 72 aa, Artificial Sequence
  Description of Artificial Sequence: Synthetic XTEN_AE72_5A_2
SPAGSPTSTEEGTSESATPESGPGSEPATSGSETPGTSESATPESGPGSPAGSPTSTEEGSPAGSPTSTEEG

SEQ ID NO: 208 - protein, 72 aa, Artificial Sequence
  Description of Artificial Sequence: Synthetic XTEN_AE72_6B_1
TSTEPSEGSAPGTSESATPESGPGTSESATPESGPGTSESATPESGPGSEPATSGSETPGSEPATSGSETPG

SEQ ID NO: 209 - protein, 72 aa, Artificial Sequence
  Description of Artificial Sequence: Synthetic XTEN_AE72_6B_2
SPAGSPTSTEEGTSTEPSEGSAPGTSTEPSEGSAPGSEPATSGSETPGTSESATPESGPGTSTEPSEGSAPG

SEQ ID NO: 210 - protein, 72 aa, Artificial Sequence
  Description of Artificial Sequence: Synthetic XTEN_AE72_1A_1
SPAGSPTSTEEGTSESATPESGPGTSTEPSEGSAPGSPAGSPTSTEEGTSTEPSEGSAPGTSTEPSEGSAPG

SEQ ID NO: 211 - protein, 72 aa, Artificial Sequence
  Description of Artificial Sequence: Synthetic XTEN_AE72_1A_2
TSESATPESGPGSEPATSGSETPGSEPATSGSETPGSPAGSPTSTEEGTSESATPESGPGTSTEPSEGSAPG

SEQ ID NO: 212 - protein, 144 aa, Artificial Sequence
  Description of Artificial Sequence: Synthetic XTEN_AE144_1A
SPAGSPTSTEEGTSESATPESGPGTSTEPSEGSAPGSPAGSPTSTEEGTSTEPSEGSAPGTSTEPSEGSAPGTSESATPESGPGSEPATSGSETPGSEPATSGSETPGSPAGSPTSTEEGTSESATPESGPGTSTEPSEGSAPG

SEQ ID NO: 213 - protein, 150 aa, Artificial Sequence
  Description of Artificial Sequence: Synthetic AE150
GAPGSEPATSGSETPGTSESATPESGPGSEPATSGSETPGSPAGSPTSTEEGTSTEPSEGSAPGSEPATSGSETPGSEPATSGSETPGSEPATSGSETPGTSTEPSEGSAPGTSESATPESGPGSEPATSGSETPGTSTEPSEGSAPASS

SEQ ID NO: 214 - protein, 150 aa, Artificial Sequence
  Description of Artificial Sequence: Synthetic AG150
GAPGTPGSGTASSSPGSSTPSGATGSPGSSPSASTGTGPGSSPSASTGTGPGASPGTSSTGSPGASPGTSSTGSPGSSTPSGATGSPGSSPSASTGTGPGASPGTSSTGSPGSSPSASTGTGPGTPGSGTASSSPGSSTPSGATGSPASS

SEQ ID NO: 215 - protein, 294 aa, Artificial Sequence
  Description of Artificial Sequence: Synthetic AE294
GAPGTSESATPESGPGSEPATSGSETPGTSESATPESGPGSEPATSGSETPGTSESATPESGPGTSTEPSEGSAPGSPAGSPTSTEEGTSESATPESGPGSEPATSGSETPGTSESATPESGPGSPAGSPTSTEEGSPAGSPTSTEEGTSTEPSEGSAPGTSESATPESGPGTSESATPESGPGTSESATPESGPGSEPATSGSETPGSEPATSGSETPGSPAGSPTSTEEGTSTEPSEGSAPGTSTEPSEGSAPGSEPATSGSETPGTSESATPESGPGTSTEPSEGSAPASS

SEQ ID NO: 216 - protein, 294 aa, Artificial Sequence
  Description of Artificial Sequence: Synthetic AG294
GAPPGASPGTSSTGSPGASPGTSSTGSPGTPGSGTASSSPGSSTPSGATGSPGTPGSGTASSSPGSSTPSGATGSPGTPGSGTASSSPGSSTPSGATGSPGSSTPSGATGSPGSSPSASTGTGPGSSPSASTGTGPGASPGTSSTGSPGTPGSGTASSSPGSSTPSGATGSPGSSPSASTGTGPGSSPSASTGTGPGASPGTSSTGSPGASPGTSSTGSPGSSTPSGATGSPGSSPSASTGTGPGASPGTSSTGSPGSSPSASTGTGPGTPGSGTASSSPGSSTPSGATGSASS

SEQ ID NO: 217 - protein, 36 aa, Artificial Sequence
  Description of Artificial Sequence: Synthetic AE36
GSPAGSPTSTEEGTSESATPESGPGSEPATSGSETP

SEQ ID NO: 218 - protein, 78 aa, Artificial Sequence; identical to SEQ ID NO: 35
  Description of Artificial Sequence: Synthetic AE78

SEQ ID NO: 219 - protein, 46 aa, Artificial Sequence
  Description of Artificial Sequence: Synthetic linker
GPEGPSKLTRAETGAGSPGAETAEQKLISEEDLSPATGHHHHHHHH

SEQ ID NO: 220 - protein, 25 aa, Artificial Sequence
  Description of Artificial Sequence: Synthetic linker
GAGSPGAETALVPRGAGSPGAETAG

SEQ ID NO: 221 - protein, 44 aa, Artificial Sequence
  Description of Artificial Sequence: Synthetic linker
GAGSPGAETALVPRSFLLRNPNDKYEPFWEDEESGAGSPGAETA

SEQ ID NO: 222 - protein, 23 aa, Artificial Sequence
  Description of Artificial Sequence: Synthetic linker
GPEGPSKLTRAETGAGSPGAETA

SEQ ID NO: 223 - protein, 22 aa, Artificial Sequence
  Description of Artificial Sequence: Synthetic linker
GGGGALRPRVVGGAGSPGAETA

SEQ ID NO: 224 - protein, 40 aa, Artificial Sequence
  Description of Artificial Sequence: Synthetic linker
GGGGTLDPRSFLLRNPNDKYEPFWEDEEKGGAGSPGAETA

SEQ ID NO: 225 - protein, 11 aa, Artificial Sequence
  Description of Artificial Sequence: Synthetic linker
GGAGSPGAETA

SEQ ID NO: 226 - protein, 798 aa, Artificial Sequence
  Description of Artificial Sequence: Synthetic pSYN-FIX-102
MQRVNMIMAESPGLITICLLGYLLSAECTVFLDHENANKILNRPKRYNSGKLEEFVQGNLERECMEEKCSFEEAREVFENTERTTEFWKQYVDGDQCESNPCLNGGSCKDDINSYECWCPFGFEGKNCELDVTCNIKNGRCEQFCKNSADNKVVCSCTEGYRLAENQKSCEPAVPFPCGRVSVSQTSKLTRAETVFPDVDYVNSTEAETILDNITQSTQSFNDFTRVVGGEDAKPGQFPWQVVLNGKVDAFCGGSIVNEKWIVTAAHCVETGVKITVVAGEHNIEETEHTEQKRNVIRIIPHHNYNAAINKYNHDIALLELDEPLVLNSYVTPICIADKEYTNIFLKFGSGYVSGWGRVFHKGRSALVLQYLRVPLVDRATCLLSTKFTIYNNMFCAGFHEGGRDSCQGDSGGPHVTEVEGTSFLTGIISWGEECAMKGKYGIYTKVSRYVNWIKEKTKLTGPEGPSKLTRAETGAGSPGAETAGTSESATPESGPGSEPATSGSETPGTSESATPESGPGSEPATSGSETPGTSESATPESGPGTSTEPSEGSAPGSPAGSPTSTEEGTSESATPESGPGSEPATSGSETPGTSESATPESGPGSPAGSPTSTEEGSPAGSPTSTEEGTSTEPSEGSAPGTSESATPESGPGTSESATPESGPGTSESATPESGPGSEPATSGSETPGSEPATSGSETPGSPAGSPTSTEEGTSTEPSEGSAPGTSTEPSEGSAPGSEPATSGSETPGTSESATPESGPGTSTEPSEGSAPGAETAEQKLISEEDLSPATGHHHHHH

SEQ ID NO: 227 - protein, 763 aa, Artificial Sequence
  Description of Artificial Sequence: Synthetic pSYN-FIX-216
MQRVNMIMAESPGLITICLLGYLLSAECTVFLDHENANKILNRPKRYNSGKLEEFVQGNLERECMEEKCSFEEAREVFENTERTTEFWKQYVDGDQCESNPCLNGGSCKDDINSYECWCPFGFEGKNCELDVTCNIKNGRCEQFCKNSADNKVVCSCTEGYRLAENQKSCEPAVPFPCGRVSVSQTSKLTRAETVFPDVDYVNSTEAETILDGPSPGSPTSTEEGTSESATPESGPGSEPATSGSETPGTSESATPESGPGTSTEPSEGSAPGTSTEPSEGSAPGASSNITQSTQSFNDFTRVVGGEDAKPGQFPWQVVLNGKVDAFCGGSIVNEKWIVTAAHCVETGVKITVVAGEHNIEETEHTEQKRNVIRIIPHHNYNAAINKYNHDIALLELDEPLVLNSYVTPICIADKEYTNIFLKFGSGYVSGWGRVFHKGRSALVLQYLRVPLVDRATCLLSTKFTIYNNMFCAGFHEGGRDSCQGDSGGPHVTEVEGTSFLTGIISWGEECAMKGKYGIYTKVSRYVNWIKEKTKLTDKTHTCPPCPAPELLGGPSVFLFPPKPKDTLMISRTPEVTCVVVDVSHEDPEVKFNWYVDGVEVHNAKTKPREEQYNSTYRVVSVLTVLHQDWLNGKEYKCKVSNKALPAPIEKTISKAKGQPREPQVYTLPPSRDELTKNQVSLTCLVKGFYPSDIAVEWESNGQPENNYKTTPPVLDSDGSFFLYSKLTVDKSRWQQGNVFSCSVMHEALHNHYTQKSLSLSPG

SEQ ID NO: 228 - protein, 226 aa, Artificial Sequence
  Description of Artificial Sequence: Synthetic pSYN-FIX-216-Fc
DKTHTCPPCPAPELLGGPSVFLFPPKPKDTLMISRTPEVTCVVVDVSHEDPEVKFNWYVDGVEVHNAKTKPREEQYNSTYRVVSVLTVLHQDWLNGKEYKCKVSNKALPAPIEKTISKAKGQPREPQVYTLPPSRDELTKNQVSLTCLVKGFYPSDIAVEWESNGQPENNYKTTPPVLDSDGSFFLYSKLTVDKSRWQQGNVFSCSVMHEALHNHYTQKSLSLSPG

SEQ ID NO: 229 - protein, 642 aa, Artificial Sequence
  Description of Artificial Sequence: Synthetic FIXFc
YNSGKLEEFVQGNLERECMEEKCSFEEAREVFENTERTTEFWKQYVDGDQCESNPCLNGGSCKDDINSYECWCPFGFEGKNCELDVTCNIKNGRCEQFCKNSADNKVVCSCTEGYRLAENQKSCEPAVPFPCGRVSVSQTSKLTRAETVFPDVDYVNSTEAETILDNITQSTQSFNDFTRVVGGEDAKPGQFPWQVVLNGKVDAFCGGSIVNEKWIVTAAHCVETGVKITVVAGEHNIEETEHTEQKRNVIRIIPHHNYNAAINKYNHDIALLELDEPLVLNSYVTPICIADKEYTNIFLKFGSGYVSGWGRVFHKGRSALVLQYLRVPLVDRATCLLSTKFTIYNNMFCAGFHEGGRDSCQGDSGGPHVTEVEGTSFLTGIISWGEECAMKGKYGIYTKVSRYVNWIKEKTKLTDKTHTCPPCPAPELLGGPSVFLFPPKPKDTLMISRTPEVTCVVVDVSHEDPEVKFNWYVDGVEVHNAKTKPREEQYNSTYRVVSVLTVLHQDWLNGKEYKCKVSNKALPAPIEKTISKAKGQPREPQVYTLPPSRDELTKNQVSLTCLVKGFYPSDIAVEWESNGQPENNYKTTPPVLDSDGSFFLYSKLTVDKSRWQQGNVFSCSVMHEALHNHYTQKSLSLSPGK

SEQ ID NO: 230 - protein, 72 aa, Artificial Sequence
  Description of Artificial Sequence: Synthetic XTEN_AE72_1A_3
PSPGSPTSTEEGTSESATPESGPGSEPATSGSETPGTSESATPESGPGTSTEPSEGSAPGTSTEPSEGSAPG

SEQ ID NO: 231 - protein, 4 aa, Artificial Sequence
  Description of Artificial Sequence: Synthetic peptide
LVPR

SEQ ID NO: 232 - protein, 4 aa, Artificial Sequence
  Description of Artificial Sequence: Synthetic peptide
LDPR

SEQ ID NO: 233 - protein, 20 aa, Artificial Sequence
  Description of Artificial Sequence: Synthetic peptide
  MISC_FEATURE (1)..(20): This sequence may encompass 1-20 residues
GGGGGGGGGGGGGGGGGGGG

SEQ ID NO: 234 - protein, 100 aa, Artificial Sequence
  Description of Artificial Sequence: Synthetic polypeptide
  MISC_FEATURE (1)..(100): This sequence may encompass 1-20 "Gly Gly Gly Gly Ser" repeating units
GGGGSGGGGSGGGGSGGGGSGGGGSGGGGSGGGGSGGGGSGGGGSGGGGSGGGGSGGGGSGGGGSGGGGSGGGGSGGGGSGGGGSGGGGSGGGGSGGGGS

SEQ ID NO: 235 - protein, 101 aa, Artificial Sequence
  Description of Artificial Sequence: Synthetic polypeptide
  MISC_FEATURE (2)..(101): This region may encompass 1-20 "Gly Gly Gly Gly Ser" repeating units
SGGGGSGGGGSGGGGSGGGGSGGGGSGGGGSGGGGSGGGGSGGGGSGGGGSGGGGSGGGGSGGGGSGGGGSGGGGSGGGGSGGGGSGGGGSGGGGSGGGGS

SEQ ID NO: 236 - protein, 6 aa, Artificial Sequence
  Description of Artificial Sequence: Synthetic 6xHis tag
HHHHHH

SEQ ID NO: 237 - protein, 500 aa, Artificial Sequence
  Description of Artificial Sequence: Synthetic polypeptide
  MISC_FEATURE (1)..(500): This sequence may encompass 1-100 "Gly Gly Gly Gly Ser" repeating units
GGGGSGGGGSGGGGSGGGGSGGGGSGGGGSGGGGSGGGGSGGGGSGGGGSGGGGSGGGGSGGGGSGGGGSGGGGSGGGGSGGGGSGGGGSGGGGSGGGGSGGGGSGGGGSGGGGSGGGGSGGGGSGGGGSGGGGSGGGGSGGGGSGGGGSGGGGSGGGGSGGGGSGGGGSGGGGSGGGGSGGGGSGGGGSGGGGSGGGGSGGGGSGGGGSGGGGSGGGGSGGGGSGGGGSGGGGSGGGGSGGGGSGGGGSGGGGSGGGGSGGGGSGGGGSGGGGSGGGGSGGGGSGGGGSGGGGSGGGGSGGGGSGGGGSGGGGSGGGGSGGGGSGGGGSGGGGSGGGGSGGGGSGGGGSGGGGSGGGGSGGGGSGGGGSGGGGSGGGGSGGGGSGGGGSGGGGSGGGGSGGGGSGGGGSGGGGSGGGGSGGGGSGGGGSGGGGSGGGGSGGGGSGGGGSGGGGSGGGGSGGGGSGGGGSGGGGSGGGGSGGGGSGGGGSGGGGSGGGGS
